United States Patent Application Publication US 2026/0357256 A1 - sequence listing, part 11

SEQ ID NO: 9 - DNA, 58617616 bp, Homo sapiens (residues 21,710,231-23,881,253 of 58,617,616)
  source 1..58617616: mol_type = genomic DNA
acttgttctatgttcttataattttgaaaatacagttgacacttgcatgacttatgaagtttttgatagtctaatgtcacttgatgttccaagaacagtatattttaaattaagaagaataaactgtatttgttttatatatttaaggcttacagtcacaaatttgaaaacttcaaagtctggttttccatctattcatacataaaacagtgtagcgtgctgaaacatttgtttttttaaagtggcagccacagttcctgtctgtctggatatattttaaacttttgtgtgttaagcttaacataagagacttcattttgttttaggtaacctaagattgttgtacccccccccccaaaaaacttcacagattactgtagggttcagcaaactgtttatataatctaacattagtatctctattttctaatgtctagattttttttagaaaagattgttttgtttttatttttgttttacaaatgtctccacaaattctggcttattttataaaataacagaatactaaagaaatgggtgctttgccatactatgtggacactggcactcaatgtccaatgcccacattggatatttggataaaataccaaatatccaaatattttaatcaaaatttagtaagtttaaataatttgattttttcactacagtgatagacattcacaaatatttcatatattaaagctatcagtgttaggttttacttagtagtaatatatatataagatcaagaatctatttaaaatggatatctttcatcaataatttggtgctttcaaatacccagaagtcttgttttaatcatattaagtctgagaataatttactaatttcatttttggaataatgtgttcaaaatgttctagtttaacctagtgttgattgatgatgggtaaacaaatcaatttttttcaaatctcataggtatattatgttattgaagatgttttcaattaaaattctccctttcaatattgtttacaggaatgtaggtctagtccaatctgctcaacctgttaatcagtgtcagctgccagattccaattcgtttttagtgtgcctgtacttttctttccataacctctgaattcatttctattacttatttaaatgttatataataaagctcatatatttaaaacaaaaccagcaggtaaaatgagttctggcttagaataaagaagctgttaccgagttacatatacagatgcatgcagctcaacaaaattttagacaaaaagtattggactgaactataacatgtgttgctatgactaaggctctaatgaccttaagaataaagacaaatttcagcaaatttatccagttgctttcagtacatgtaaaggtagtacatcaagaattctcatgctactgcctgagaaaacagattctactgttacctaataaatcaaaatcaactggatggcgtttctataaccttgcaccaggtaaagaaaaactgcaatggaggactaattaacgcagactccatcataaggaaaagggtaatccagaatgtcactttcaatatttaagtatttaaatttttagttgaaaatgtggtgaaatagtgcttttggtaagctttgtgtagttgaacatcagcattaagtagaaaaaaatctttaaaaatgtaaacaaacaaaaccatacaccaaaaaaactaacttgaccagtgtgtacatattgatctttgtgttggtagagtctaaagcagaacatttggtgaacttgatacaattattttgatcacattggcataccaataaaatcacttatattgggtcaggtgcggtggctcacacctgtgatcccagcactttgggaggccaaggttgggcggatcatgaggtcaggagtttgagaccagcctgaccaacatagtgaaacaccgtctctactaaaaatacaaagattagttgggtgtggtggtgcacacctgtaatcccagctactcaggagtgagggtgaggcaggagaatcccttgaacccaggaggtggaggttgcagtgagccaagatcctgccactgcactccagcctgggtggcagagcgagactccatcttaaaaaaaaattatttatattcagtttgaataaaacattttcacatcttaaaaatactgctttgtacttagtatgaacaataaatgtaaagtctttatcctcaaacggattctgattgtcaactcaatacatatggcaacccatttctctggtttatccaaactgaagtcttgtgaaggctcaaatatagaatgagagggactcaacaacagagcatgagaagcaagaaggatggggtaggatgatcagccctaaggctcagggattcctggggaccccaatataatgacatcaactatgaagcttactaactgaaaataagcataagcagctgaaaactccatggcttgctttggtgggaaggagtctctggaattagagtcatgccaaaaggattgagccagaatgacacgtctctaaggattattaggggggactgttcataagcacataaacatttgttccaaatcttattacagtagcaatatccttttctgtaatatcagcttccccaacgtacggttgccatagacaaactaagacaagtgcctaatatgttgtaggcaattagtttctaaatttaaaaaacttgcaataattttatgaatttcattaaactctgtttcatgtataaatctcactgaaaggcagtatccagtagctattttccttagtcctttctgggattttctgttgcttgattccaaaccaaccttaatttaatcctagtcatttctaaatccccagatggaataacagaaagacagcagaaatgaacccaagttaccccaaacagtcaacatctaacatattttgttccccaaatgaacaaaaaatcacacaagctaaaaaacagtgggtttaaaatttaacccaaatttaacagtagcagttttaccatatgtaaaaattagcaaagtcataacttagatacccatagtccgttattctagaaaaaattaatacaattatgacttttttagaaaagaataaatatgacaaaatatacccgctcatatctttgaaatatgaatgattttttcttttaatatttaatacttagacaagtattatagctatcattcatgaattaaagtagccttaggggaaatagtgttttatattaataatgaagattgaagctccagggatgtcaaataatttctcttggatacacagctagtgacccaacaagctcaaatatgtttgatttaaaaattttgacttttccactgttgacattgttgacataacagctaaatctgagtctcagggttgataatttagaataaatcaagacaagtactattgaggcaggctaggtagtcaagaaagtgacgatgtcctcgggatgcagcaaccacagcaattgcatgctgactgcatattgtcaacacgataagccccagcatttacactgtatttcagccattcaagcaaagctctcttcagtagggaaattcccctgtagagaacatgcacattttgattttacttgtcctctaactgaccttttactcattataatagtaaaaaataaacacgtgtgtgaagatttaagatgttaatgagatatgtgacatataagcatgtacagccactgtgtctgtgcaccaaaaggaccacccagaacatgcttactaacacctcttcccgtctccttgtaaataattacgtaagactcccataactgagtctccctagttccagtctttgctgtctcattcttacagcagcctgccctgaattcctcctctctcagcgagtactggctattctttacctaacttttaaaatagtatttctactttgcaataaatcactctatgctgcatcttcattgttttgtgtctcttgtttaaattttttgaaagtgagaagaatcgaggtctcacacagccatcaacactatcatgctttgttttgtattctttattatttctttctctgatatgtcaccattcatattttaaacccagacaacgctgctaaattaaaaatttaaataatcacaaaatgatttgtcataaaagcatgtatatggctgggtgcggtggctcacgcctgtaatcccagcactttgggaggccaaggcgggcagatcacctgaggtcaggagtttgagaccagcctgaccaacatggagaaaccccatctctactaaaaatacaaaattagccaggtgtagtggcgtatgcctgtaatcccagctactcaggaggctgaggcaggagaattgtttgaacccaagaggcggagcttgtggcgagcctagattgtgccattgcactccagcctgggcaataagagcgaaagtccatctaaaaaaaaaaaaacagttaaaatgcctttgaagagtgaaaataaaggatagattaagcagagaatttgacatggaaaaaggctggtcaattgtttgaaaattacattgcggctgggtgcagtggcttatgcttgtaatcccagcactttgagaggtcgaggcaggcacatcacctaaggtcaggagttgaagaccagcctggccaacatggcaaaaccctgtctctactaaaaatataaaatttagctgggtgtggtggtgggcacctgtaatcccagctattcgggaggctgggtgcgtggcaggtgtgtgacaccatgactagctaattttttttaattttattttttgtattttcagtagagatgagtttccaccatgttggccaggctggtcttgaactcctgacctcaagtgatccgcccatctcagcctcccaaagtgttgggattataggcgtgagccaccatgcccagcatattttttccaaattttctagtttgcatgcatagaggtgttcatagtagtctctgacaattttttgcatttatgtaggattagttgtgatttcacatctctaatatttaaatagatgcagagaacaacagaaaaaaaaaacagatgcagaataaaagtttgacaaaagttgacattcccttatgataaatctctgaaaaatttaggtatagaacaaatgcacctcagccaataaatgccacatataaccaaaaaaatgcacagctaacaacatactaaacggggatatattgtaaacttttactctaaaagctaaaacaagacaaggatgcccactctaatcagtcttactaaacatagtactaaatgcccatgacaaagaaattagagaataaaatcaaagacatccaggttaagaagaaattacattatccctatataattatcttttatctctgtacataatctgaagtatagaacagccgaagattttactgaaaaatattaaaataaacacatttattaaactttcagaatacaaaagcaacatccaaaagtcagtagcatttatgtacactaacaaatatctcaaaatgaaattaaaaaataattccatctacaaaaactgtagtaactatattttgaaaaaaacttaaccaaaaagttgaaacaccttatattatactgtaaacagcattacataaattgagtaatgcgcaaatgaaatactactcatttatgaattgcattaataaatttctatatcacacaaattgatctacagatataatgcaacccctatcaaaataccagtggcatactgcatagaaaatttaatttatatggtaccacaaaagaccctgaatagccaaagcaatcaagaaaaaaaagtaaaggtattaccataccttcaaaatattctacaaggcaatagtaactaaaacagtatggtacttgaataaaaacagacacataggccaatgcagtagaaaaaaagagaccagaaatatatccatgtatttacagctaagtgatttggaataaagctgacaatttctttttttatttttgagatggactcttgttctgttgctaggctggagtgcagtggcacgatctcggctcactgcaacctctgccatctgggttcaggtgattcccctgcctcagcctcctgagtagctgggactacaggcgcgtgccaccacacctggctacttttttgtattttattagagatggggcttcaccatgttggccaagatggtctcgatctcctgacctcatgatccaccctccttagccttccaaagggctgggattacaggcatgagccaaaagaacagtaacttcaataaatgatgttgagaaaactttatgtccacaggcagagaaataaaatgagaccctcatctcacaccgtatataaaaaccatttcaaaataaattagacgcttaaatgtaaggcttgagatgagcctggtggctcacacctgtaatcctaccactttgggaggtggaggcaggcagattacctgaggtcagttgttccagaccagcctggccaaggtagtggaaccccatttctactaaatatacaaaattagctcggtgtggttgcaggcgcctgtaatcccagctattcgggaggctgaggcagaagaatcacttgaacccgggaggtgaaggttgcagtgagctgagatcgtgcaccattgcactccagcctgggcagcaagagtgacactccatctcaaaagtaataataacaaataaatgtaaggcctgaaactctgaaactgctacagaaaaatagaatgaaagccccttagactgttctgggcagtaagttggttttttgtttatttttttttttgagacggagtctcactcggtcacccagcctggagtgcagtggcatgatctcggctcattgcaacctctgcctcccgagttcaagtgattcttctgcctcagcatcccaagtagctgggattacaggcacccaccaccacacccggctaatttttgtatttttagtagagatggggtttcaccatgttggccaggctggtcttgaactcctgacctcaggtgatccacccacctcagcctctcaaagtgctgggattacagacgtgaaccaccgtgtctggtcagtttttttttttttttttatttaacctcaaaatcttaggaaataaaaggaaaaatagatgagtcagatgacttcatattaaaaagctgctgcacagaatctgatacaatcaacaggatgagacaactaaaaaaatgaaagaaaatattcgcaaattacatgtgacaaggagttaataccaaaagtatgtaagaaactttgctgggtgcggtggctcacacttgtaatcccagcatttggggaggctgaggtgggcagatcacctgaggtcaggagttccagaccagcctggccaacatggtgaaaccccgtctctactaaaaatacaaaaattagccaggcgtggtggcacgtgactgtaatcccagatactagggagcctgaggcaagagaattgcttgaacccaggaggtggaggttgtagtgagctgtgatcataccactgcactccagctggggcgacagagcaagagtcagtctcaaagaaaaaaaactacatatatatgtatatatatatatataaataaatatatgtataatatatatgaaactcaattaactatacaacaaaaacaagtaactcttaaaatgagcaaaaggcttaaataattttcaagaaaagacatacttatggccaacagatatatttaaatatgcccagtgttaagtacgatcagggaaaggcaagccaaaaacaactatgagatatcaattcactcctgttagaatgactcttattaaaatgaaaaagaaaaaaatgttatgaaagatgagaaggcattgcgtggacactgttggtttgaatgtaaatgaagacggccgttaggaaaacaaaatagagatttctcaaaaaacttaaaatcaaactaccatgtaatacagctgttgcactattgggtatatttccaaaacaaatgaaatcagaatgaagaaacacttacacttctatgttgtttgcagcactcttcacaatagccaaaatatagaatcaacagttcaggctgggtgtggtggctcacacctgtaattccagcactttgggaggacaaggcaggcggatcacttggggtcataagttcgagaccagactggccaacatggcgaaaccctgtctctactaaaaatataaaaattagccaggcatggtgacgggcacctgtaatcccagccactctggaggctgagttgggagaatcacttaaacccaggaggtggaggttgcagtgagccaggattgctccactgcactccagccagggtgacaagagtgagacttcataaaaaaaaaaaaaaaaaaaatcaacagttcagcatctaatgagtaaagaaagacaatgtggtagatatatacagtggaatactatttaaaaaagaatttttttgagaccaagtctctgtctatacaatctcggctcactgcaacctccacatccctggttcaagggattctcatgcctcagcatccagagtagctgagattacaggtgtgcaccaccatgcccagttaattttttgttgtatttttagtaaagatggggtttcttcatgttgcccaggctggtttcaaactcctgggctcatgcaatgcaccttggccttccagaatgctgggattacaggtgtgagccaccacacctggcctttaaaaaaaaattcattatttttaatcacatggattaagctggagaacattaattgagataaggttaatagttcatgatttcacttacacatggattccaaaaaacataacctcattgatgtaaaatggtgaccatcagaggccaatgtatttagaatgggctgggcacggtggctcacgcctgtaatcccccagcactttgggaggctcatcacgaggtcaggaggagaccatcctggccaatatagtgaaatcccgtctttactaaaaacacaaaaattagctgagtgtggtggcacatgcctgtaatcccagctacttgggaggctgaggcaggagaatcacttgaactggggaggcagagattgcagtgagccaagattgtgtcactacactccagctggtgacagagtgagactgtctcaaaaaagaaaaagaaaaaagagggttggaatgatatctgtcaaataatacatagagttgaatagaagaaataagttcaagagatttttttgtacagcatggtgactatagctcatgtttttgtatttttgaaaagtggtaagacaatgtcatgtggtctcaccacaaaaacgttaactatgtgaagtattagttacctagaactaatcacctgacaatgtatatacacttcaaaatattatgttctacagaaaaagtacacattttatctgtcaagttaagtttttaaagctttatagaaggataacaatgtgtcaaatactgtccatgtttttgtcataatcttggttgaatagtatcaaaatatatagtttttgtttttggttgaatagtatcaagatatatagtttttgtgtttttatcatttaatttgtcagtcataaccgtaggaactccgatatttaacagtatgttctggacccagcacattgcatggaagaagcttatgtcctttaggatttttactttaagctccgggcacctggagtttctggtgctgatggtaatggtatgaaagacactcaaagagcaggtgttgcttatggtcccatgactggccactctgtgaacacagtaaactagtttgcatgcaaagtaacagaaaatgttttaatccaaatgctgtcatgatgcccaaaatttatccagaaaaaatgactaaggagttgcctgcatttcagggacagaaaataaaaactgtagactaaacttcacccacttaaaaaattatatgagaaattcctccaaattgtaatatcaatatggaaaagcaatattcttttaagtttcaaattcacagagctcattattttgtagcctttagcattcacttaaaaattatatgtgttatcctcccgtctccctctccctctcccgtctccctctccctctcccgtctccctctccctctcccgtctccctctccctctcccgtctccctctccctctcccgtctccctctccctctcccgtctccctctccctctcatgccgagccaaagctggacggtactgctgccatctcggctcactgcaacctccctgcctgattctcctgcctcagcctgccgagtgcctgcgattgcaggcgcgcgccgccacgcctgactggttttcgtttttttttggtggagatggggtttcgctgtgttggccgggctggtctccagctcctaaccgcgagtgatccgccagcctcggcctcccgaggtgccgggattgcagatggagtctcgttcactcagtgctcaatggtgcccaggctggagtgcagtggcgtgatctcggctcgctacaaccacctcccagccgcctgccttggcctcccaaagagccgagattgcagcctctgcccggccgccaccccgtctgggaagtgaggagcgtctctgcttggccacccatcgtctgggatatgaggagcccctctgcctggctgcccagtgtggaaagtgaggagcgtctctgcccggccgccatcccatctaggaagcgagaagcgcctcttccccgccgccatcccatctaggaagtgaggagcgtctctgcccggccgcccatcgtctgagatgtggggagcacctctgccccaccgccctgtctgggatgtgaggagcgcctctgctgggccgcaaccctgtctgggaggtgaggagtgtctctgcccggccgctccgtctgagaagtgaggaaaccctctgcctggcaaccgccccgtctgagaagtgaggagcccctccgtctggcaaccaccccgtctgggaagtgaggagcgtctccgcccggcagccaccccgtccgggagggaggtggggggggtcagccccccgcccggccagccgccccgtccgggaggtgaggggctcctctgcccggccgcccctactgggaagtgaggagcccctctgcccggccagtcgccccgtccgggagggaggcgggggggggggggtcggccagccgccccggccgggaggtgaggggctcctctgcccggccgcccctactgggaagtgaggagcccctctgcccggccagtcgccccgtccaggagggaggtgggggggtcaaccccccgcccggccagccgcccagtccgggagggaggtggagggtcagccccccgcctggccagccgccccgtccgggaggtgaggggcgcctctgcccggccgcccctactgggaagtgaggagcccctctgcccggccagccgccccgcccaggagggaggtgggggggtcagccccccgcctggccagccgccccatccgggagggaggtgggggggtcagccccccacccggccagccgccccgtccaggaggggggagggggggtcagccccccgcccggccagccgccccgtccgggagggaggtggggggggtcagccccccgcccggccagccgccccgtccgggagggaggtggggggatcagccccctgcctggccagccgccccgtccgggaggtgaggggcgcctctgcccggccgcccctactgggaagtgaggacccctctgcccggccagccgccccgtccgggagggaggtggggggaacagccccccccccggccagccgccctatccaggaggtgaggggcgcctctgcctggccgcccctactgggaagtgaggagcccctctgcctggccagccgccccgtccgggagggcggtgggggggtcagccccccgcccggccagccgccccatctgggaggtgaggggcacttctgccgggccgcccctactgggaagtgaggagcccctctgcccggccacgaccccgtctgggaggtgtgcccagcggctcattggggatgggccatgatgacaatggcggttttgtggaatagaaaggcgggaagggtggggaaaaaattgagaaatcggatggttgccgggtctgtgtggatagaagtagacatgggagacattttgttctgtactaagaaaaattcttctgccttgggatcctgttgatctgtgaccttatccccaaccctgtgctctctgaaacatgtgctgtgtccactcagggttaaatggattaagggcggtgcaagatgtgctttgttaaacagatgcttgaaggcagcatgctcgttaagagtcatcaccactccctaatcttaagtacccagggacacaaacactgcggaaggccgcagggtcctctgcctaggaaaaccagagacctttgttcacttgtttatctgctgaccttccctccactattgtcctatgaccctgccaaatccccctctgcgagaaacacccaagaatgatcaataaaaataaaaaaaaaaaaaaaaaaaaaaaattattattaaatgtgagaaaaaaaaaaattatgttatacttttattatataagtatatattttaataaaagtatgttacataataaaaaataaatttaaaattgttcacttaccattaactcttaaaaatttaatttctacattttcttgcaaattttatgtttgccacactttaagaatctaattttttttttaacaaagaacaactattctgatttaatcttctcacctgtggacaatgtatgcttttatcttaactaatccgaaagttatattgataaccaaactctccagttaaaaacaattattcagtgcattaaaaaataccaactttcagctgggtgcagtggcttatgcctgtaatccaagcactttgggaggctgaggcaggtggatcatatgaggtcaggagtttgaaaccagcctggccaacatggtgaaacttcgtctctacaaaaaattaaaaaaaaaaaaattcagccagatgtggtggcaggtgcctgtaatcccagctacttgggaggctgaggcaggataattgcttgaacctggaaggcagaggttgcagtgagcccacattgcaccactgcactccagcttgggcaacaagagtgagactctgtctcaaaaaaaaaaaaaaaaaaaaaaacaaccaactttctcgtcaaaatttacaaagtaccatgtgaaatgaaatggcattaagacaacagtgagaaaactgaagccataacacagaaaaaggagatgggctgtgctgcatacatagctggggatacacataataaatacagagaaatctgaagataattaagaaataaaagatgcagaacttctctttaaattcagcaagattcagcattgcagcctggaaactatgtcctctccacatgaagaatcaattttatttcttcaccactgatgttttccatctctgaactgaagttacaagctaactttagcaggaatacttatggcttactatggagcatctgttacacagcaagaactgtcatgtatgtttgctacatttaaatataaaaacatcctcacgacttataaagcttccctagtacttacctgaacaaattgactcaataaataaatttacttatgtcaactataaaaagtgaaaagaaaaataactaaagggctatagagttctccaactaaaaacaaaatgaagtgttctaactaaataaaatgtaacttaatacactaattgtggaattacatttaaaaattttgtatgcactaaattttgtaaaaattattcttataatcacagaccagctcacataatgaatacttcataatctgtaaaatatttatatgaaaaaagatacaaaataattaggggtctatcatgagtaccaggcaagtataaacagaattttcatggggagattcagaactataagccacagaatgtacagtaataaattcaatacaaagcagagaatacattttcttttagcatttttgaggcttttagttttctagtagtcatcttgttaaaatgatttgttttgttcagtattgcttttttcttcggaaaacaggtacaaattcatacacacaaactcactctataattttcttacacttaaggtttatctttagactaacatatatttaactatatgtaaatcaaaactaaatgtctgcatgtgtttgcaggcagacaggaaacatgctcaaaaaataaatattagaaaactttaaaaatacttattcaggcctcagaaatgtagggattttattatacttctacataacttttattatgaccataaaaataacactgtaatcaataacaatttaattttacattttaaaataactaaaagtataaaactgggttgcttgtaatacaaaggataaatactagaggtgatggatacctcatttaccctgatgtgattattatatactgtattcttgtatcaaaatatgccatatattgcatgaatatatactcatattatgtaccccaaataattaagaaaaataaatttaaataaaataaacatttggctgggcacggtggctcatgcctgtaatcccagaactttgggaagccgaggcaggcaaatcatttaaggtcaggagttcgagaccagcttgacttacattatgaaaccctgtctctactaaaatacaaaaattagctgggcatggtggtgggtgcctgtaatcccagctacttaggaggctgaggcaggagaattgcgtgaacccaggaggtggaggttacagtgagccgagatcgtgccactgcactccagcctgggtgacagagcaagactacctctcaaaaataaaataaaataaaaacaaaaatttaacctacagaaataatattctttaacttatttgcagtcaaagccactagcaaaagagattactagagatgttaatccattatgttaccaaatagtatactgttaccatgttttacgtacacccttgagtaaggtggaataggttaatgtctgtggcataataacacttcactgaatgcacaatagtatttaacatgttaaaaaggttgaatatattaacatcacatataatctgaaatttaaaaaatatactgcattttatataaaagtattagtaaaatatactaattttaatttacttataaatgaaattaagttttctcataatgcagaatattactctgaatgcctaacgcacacattgcttaatattataagttaaccataaaagtctcttcacttagattttcatcatacatctcatattttaatgtctttttcatagcaaagtttataaataatgctcacctaataaaaaagaatctctcatatctgatgcagcaacaattgatcacatgctttcacatgtaaataggagtgaagaaaaggcaggaaataatttaagagttgaattacattattactcacttttcaaaaaatctaattttttcaaaaagttaagcatactttgaatgcaataactgcaaaaaatttctacttttaaagttatatacaaatattttaccaattttagttttagattattttctatactcagcactctgatttagtaaaatacctgaagcatcagtgccttacatatttctactgtaaattctctgatatttacagacttaatgattaaaatttttaaaaaatttttcctgtatctgcaaaaatatgttttagtatgaactctctggtgttttctaagctgtagtttttgaaaaagtatttttccaactttattacattcgcacagtttttttcaatataaattccctgatattgaacaaagtttgagcaactgcttcagaggtttcctctaatacaaaacgtgtacagtaagatctgtgatacaagtaaacatattacaattctactacaatgttcttcttcaaaatactcttcactttaaaagcttatattttcttaaagatattttgacagtagttgcacttatgtttttattgagtatgaactctctgatgttgagtaagatgtgagcatgtattaatggctttttcacagtctttatatttgtacaatatttctcaagtataaatgctttcctgtgaaggtgtgagcattagttaaaagttttgtcacactgttcacacatgtagaagttttctccagtataacttaccttacctacaatcaagtgtgacaaccatttaaaactttatcacattcttcacatttctaggatttctcaacactatgatttatgttttgaaaagtttgaggtgttttcaaagcactgtcacatctttctggtttgtagaatttctctctagtatgaattatcttatgtctgttaggaattgagaatttattaaaggctttgccatattcttcacagtcacaggagttccctccagtatgaatttttttatgtttagtaagagttgaggactggtaaaaggctttgccacatttttcacatttgtagggtttctctccagtatgagttattttgtttaataaggcttagggactggttaaagtctttaccacattcttcccatttgtaagatttctctccagtatgagttatcttatgtttagtaagggttgaggatcggttaaaagctttgccacattcctcacatttgtagggtttctctccagtatgaatcatcttatgtgcagttagttgtgaggaccggttaaaggctttgccacattcgtcacatttgtagggtttctctccagtatgaatcatcttatgggtagtaaggtttgaggactcattaaaagctttgccacattcttcacatttgtagggtttctctccagtatgaattctcttatgtttagtgagggctgaggaccagttaaagcctttgccgcattcttcacatttgtagaatttctctccagtatgacttgtcttatgtttagtaaggtatgagaatcggtaaaaagctttgccacattcttcacatttgtaaggtttctctccagcatgagttatcttatgtgtagtaagggttgaggactggttaaaggctttgccacattcttcacatttgtagggtttctctccagtatgaattatcctgtgtgtagtaaggtgtgaggaccggttaaaagctttgccacattctgtacatttgtagggtttcactccagtatgaattcttttatgtgtagtaaggtgtgaagaccggttaaaagctttcccacattcttcacatctgtatggtttctctccagtatgaattatcttatgtgtagtaaggtgtgaggaccggttaaatgctttcccacattcttcacatttgtagggtttctctccagtatgaattctcctgtgtgtagtaagggttgagaaccagttgaaggctttgccacaatctttacattggtaggaattctctgtaatatgaaatcttttatgttgagttaggtgtaaaagcatgcaaaatgatttttcacattttttacatttgaaaggtttctttctagtatgtcttatcttatgtctgtttgaatttgaaaatgtatgaaagacttttgcagatggatcacattgaaatatgttgctctgggtagttatcaaacactggtttaatttgttatcatgttctttgtgcactttacactcatccacacttttacagcctttttgtaactgtaaattgtcatgtccatattttccatattttttcagaatcgcttcttgaaaagaatctttaatgtcctgctctgcccaaaggtcttggggaaaatgagaacatataactgaaagaaataaaaataacaaattactttacttactagacacagatagtttacaaatctaacctctaatatacaaactacataaataagatggcataggaaaataccaaaggccctcattcctttatagacatataaatgtaaaaaaaaaaaaaccaaccaaattacatctgaaaaaaattataaatgagttaagtgtgtgaagtgcccctggtgagaacaatgcaaagagccacttagaagtaaaagtctgtacatttacccaacagagctctttctgctccccaatataacatactgtctttagaagtaaattgccaacttgtttttaatgacaagtaaaatactggcacatttatctttattacttgcttctaggagcctttccagacactggtttgtgtctctcttgaaatataatgctgaaagaaacggtggtatactttggagtgacagtcttaactttgctgagaccaaaggtaaatgtttcagcaacagagagactgctgtaccacagacagaaaacaggtgtagcacgtgattattattaagaagaaacatgaataaactcctttaactaaaagagaaagacaaaatctcagacaagacacattctaagaacatgtttgagagactcccagaatctctaaccaagacgattgttcagactatgccaggacaaagctacattataaagattgtgacaggtagccttttttaatgtccaaatttcaatcaaggattacaatgtatacaaaataaggcaatatggttccataaaaatataaaattttaaaaaagaaactataaaaaagatgtatacacaccgattttaaaaattgaaaataaattgaataatactcagtgagtgaaacaggaagacagagaactatagaaaatcagaaaaatgaagataagaacataaatatttagaatatcaaaaaaacaaattgtggaggtaataaatataaaaaagaatagctgaaaaatattgaaagaaacgatgtaaagatgaagaagctcaacaaacaaactaggaaacacacaaagatatttataacaaacacatatataagcacaatttcaaaagtcacagacaagagaaccttgggagctgcaagataaaagtgatgcgtcatttgccagcatagtcttatgagacagccagtgaattgtcaataaaaattttgcaggccagaagggaagtgtgtaataaagtcaaactcctgtaaaatacagcaatcaagtaagcataatactatcagcaaatctgtcctgccaaataaaaagaaaataactttcaaaagtaacaaaattctgaaaagtatattggaactccataaaccctacatacaaaatgtactgaaagcagttgcttctattgaaaataacatgattcaacaaaaacaacacagtcaaataaaaatacattactttcgggaggggggagggatagcattaggagaaatacctaatgtaaacgacgagttaatgggtgcagcacaccaacatggcacatgtatacatatgtaacaaacctgtacattgtgcacatgtaccctagaacttaaagtataataatgaaagaaaaaataaaaacaaaacaaaacaaaaacaaaaaacaacaaaaaaatacattactttctgggaaagattatatgcacatatatacttttacttctaagtatatgcacatacaccaaaatggaattccttagcattatcataatggtgcagaaaacatttttaattattctctaaaatttgaaagtgaaaatcagagaaatcattataaacatctgttaataaatatacaacataaaaagatataattagcaaaatcaatgacaaatttgaggggagaagtaatgagaaaaaaaatgtgcatgcaactgaagttcttttttaccagattgaaatatactgttatatcttttagaggtttacgtaatccccaaggtccaaaaaagaacatgtgtgtatagatacacaaaacaagaaagaagtaaaagcatatcaatataaaaataaaaagatacaaagacagagagaaaatgagtgaccaagatataagaatcaaataaaacaattaataaaataacattagtatgtctttctgtttcagaaaattatttaaatatatatgtttaactttccaatcaagagacatactttcaatagagacttatttaaatattttaaaaactgagatccaacttgcctttctacgacagtaagctgagatctattgattaaaaaaaaactgaaagtggcaagatggatgtagatattgcatgtaaatattaaccaaatgagagaagaggtcaaaataatattacataagctacatcttacgtgaaaaactttcatattttataaaatgtactgcaagtcaaaactgcaaagagacaaagaagggcattaaacaataatagattcatttactgataacctaagtgtgtgtgtgtgtgtgtgtgtgtgtgtgtgtgtatctcacattaaggttccaaatacataaagcaaatattgatagaactgaagaaacatctagacagcaatactatagtaggacatttcaataacttactttctgtaataaaaataaatcaaaacagaatatttgtaagtgaagagaggacgtgaaggcagtataaaacaattatttctaacagaggtatagagaagattcctcaacaatatcgggatacacatgcttctcaattgctcatacaacattctccttaatagaccacatgttaggccaaaaaagaagtcttaacacatttgttaagactgagattgtatggattatattacatgaacaaaatgggagtataaaacaataatagaaaaacaattaaacatttacaaatatatggaaattaacacactcttgagcatgctcctgttcaaagatagaaataatagatattttgaaaatgtccatacttttcaaagtaatctacagatttagtgcaatgttgttaaaaatttctcattgcatttttgagaaactagaaacaacaaccccaaaagtatataaaatgtcaagagacaataaagtacccaagagtcttcaaaaaaaagaaaatgttgaaggcattatagttcctgatttaaaagcacattgcaaagctacataattaaaacaagttggtatgagtataatggttaaaaagtagactaataaaatagaatgccacatctatagaaactttcacatatatgtttatatgaagagttattttcatatccataattattgcagcattttttaccaatagcaatgcaagtttctttcctttttctttccttttttttttattttttattttttgagatggagtcttgcactgttgcccaggctggagtgcagtggcatgatcttggctcactgcaacctccgcctcctgggttcaagtgattctcctgcctcagcctcctgagtagctgggactacaggtgtgtgccaccatgcctggctaatttttgtatttttagcagagacagcatttcaccatgttggccaggatggtctcgatctcttgaccttgatatccgcctgcctcagcctctcaaagtgctgggattacaggcatgagccaccgtgcccggcaatgcaactttctgtcaccaaattatccaatagatataatttgcaatataaaaatactggaatatcatccaggatttaaaaagcaggaaatattctaataactctaaaaataaagcttgatgacattatgcaaaataaaatgagctagccacaatgagacagagattgtatgagacacatgaagcagtcacattcttagaaatagaaaacaaagtggtgtttgcaaagtgccagaacatcagacaaattggttgttgtacattgagatttagctttgcaagataaaacattctaggggtatgctgcataacattatcaatataattaagaggaataaacagaatattaaaaaatatttgataatgggcctggtgccgggactcacatctgtaatcccagcactttgggaggccaaggtgggcggatcacaaggtcaggagttcgagaccagcctggccaacacagtgaggcaaaagaatcacttgaacccaggaggcggaggttgcagcgagccaagatcccgccactacaccccagtcttggcgacagagcgagactccgtctcaaaaaaaaaaaattgctaatattttatgtgttcaagtaaaaatgaacaattaataccaagaaagatacagttacaatagtttcaatattatcttcaaatcccaaagtgtttctcccacatagaagtaatgtagattcacaacagatattgaaattaggagaatttttataactggtcacctagccaagattgaacgaccatttacaacaaacctacacaacaaatatacaagtcataaaataaacagagatgatatttgtagaggcaaacaaacacagaggtaattatattggcagtagacatatggctgatttatatttgatttggctagacacagtcttaaattgtacagagttaaacactgtcatacacaatggcaatataaaataaaacaccaaaacacaagcaactggtgttaggtgtcataccttaaaatacataacacaatataaaatatatatatatataatatatgtaaaatatataacacaaaattaaaatatggaatgtaaaacgtattggatgccatcaagtagatcaatatattcatcaaatgaatcttagaagaatatagggaaaaagtaatacagaggtaacttgaagacaaaaaaggctgagaacttcccaaatttttatgtaacaaaaaaatttctaaccaatatttaattcaaaattattttacttcaaaaacaagataaaaataaggactttccaaaataaaaattcagggcatttattacaactaccacagtcctacataaaatgttacatggtggccaggcacagtggctcaggcctgtaattctacagctttaggaagccaaggcagatagatcacttgagaccagtagttcaagatcagccagagaaacatagtgaaactctgcatataaacaaaaagaaatgctaaaatgagtccattatgttgaagaacaaaatgatgccagaagtatcaaaaaaatgtataaatataaaactctctattaaatgtaaatacagacacatatagaatttttttactatcataatgatgcacataaaacccttacagttctttagatataaaaaacaagatataaatctgcataaatctgttaatagatacacaatgtaagataatatggtttttaatattaataacaaattggaaaatataacaacagaggttttgtacttaattgaaggtgtgatgagattaaaatacattgttttaactttaagatgttttatgtaatctgtttttcaatatggttacattatatttcaagatgattacattatacttctggaaagtatgcaaaacaaaataaaaaataatcaaagcaagtcacaacaaaattaaaacaaacaaaaattaaggtagtaacacaggaaatgagaaaagacatatctacaagaaacacataaaatagtaacaatgaggtgatttctgcagatcagcagacttagtctttccccctgctggctgaggaatctgggcagtccagatgtatggaatttctcccagtgaagcacacccccttcaccaagaagcagccagagtgccttgttaaatggttcctgaatcctgtgcatcctgactgagtgaggaccaccccaccaacaggcattgtaagacaacttataaagaagtattcccactgtcatcagctcagtgcccatctgggataaagcttacagatgaaggagcaggcagttctctctgctgttctacacactccactggtgacacctccaggtgtgggagaaacccaggcaaataggatctgaagtggatcccaagcaaatcacagcggccctacagaagacgggcctgactgttaaaggaaaaacagaaagcaaccacagcagcatcaacaaaaatgtccccacaaaaaccccatccaaaggtcagcagcctcaaagaccaaagctagataaactcatgacgatcagaagaatcaaccaaaaaatgctgaaaactcaaaaacccagagtgtctctactcctccaaataatcaaaacatatttccagcaagagcacagaaccgggagaagcctgagatggataaactgacagaagtaggcttcagaaggtgggtaataatgaacttcagtgagctaatgaagcatgttctaacccaatgcaaaaaagccaggaaccatgaaaaacattacaggagctgttaacccgaataaccagtttagagaggaacataaacgacctgatgcaactgaaaaacaacatgagaacctcacaatgcaaccacaagtatcagtaactgagtagaccaagcaggaaaaagaatttcagagcttgaagactatcttgctaaaataaggcagataagattgaaaaaataaaaataaaaaggaatgaaaaaaatcttcaagaactattggattatgtaaacagaccaaacttacaactgattgcagtacactaaagagagggaaagaatggaaccaagttggaaaacatacttcaggatatcatcgagaaaaacttttccaacctaacaagacaggccatcattcaaattcagaaaatccagaggaccccagtaagatactccatgagaagatcaacctcaagacacataattatcagattattcaagtttaaacttcaggaaaaaatgataaggacagccaaccggaaggccaggtcacccagaaagggaagcccatcagagtaaaagtggacctctaaaaagataccctacaagccagaagacattgggggccaatattcagcattcttaaaaaaaatgaatttctaacccagaatatcctgcaactaagcttcatagtgaaggagaaatgaaatcattttcagacaaacaaatgctgagggaattcatcaccactaggcctgctttgcaagagctcctgaaagaagcactaaatatgaaaagaagaaaccactaccagcaaatgcaaaacacattgaagtacaaagaccaatgacactacaaaacaactacgtcaacaggtctgcaaaataaccagctagcaccatgagaacaggatcaaattcacacataacaatattaaccttaaatttaaatggactgaatgctccaattaataccagaacttttggaggccgaggtgggtggatcatgaggtcaggagatcgagaccatcttagctaacacggtgaaaccccgtctctactaaaaatacaaaaaattagcagggcgtggtggtgggtgcctgtagtcccagctactcgggaggctgaggcaggagaatggcatgaaccccggaggcggagctggaagtgagccaagattgtgccactgcactccagactccagcctgggcgaccgtgtaagactctgtctcaaaaaaaaaaaaaaaaaaaaaggcacagaatggcaagctggttaaagagtcaactcactggtgtgctgtattcaagagacccatctcacatgcaacgacacacatagcctcaaaataaagggagaagaatttaccaagcaaataaaatcagaaaaaaagcagaggttgcaatcatagtttctgataaaacagactttaaaccaacaaagatcaaaaaagacaaggaaggacactacataatgctaaagggatcaattcaaggaacacccagatttgtttttattgctcgcttgattgattttttttgagacggagtcttactctgtcacccaggctggagtacagtggcatgatcttggctcactgcaagctctgcctcccgggttcacaccattctcctgcctcagcctcctgagcagctgggactacaggtgcccgccaccacattcggctagtattttgtatttttagtagagacggggtttcaccttgttagccaggatggtctcgatctcccgacctcatgatctgtcagcctcagcctccaaaagtgctggcattacaggcgtgagccaccatgcccggccttattgatttatttttttgagatggaatctcactctgttgcccatgctagagtgcaatggcgcgatcttggctcactgcaaccttcacttcgcaggttcaagtgattctcctgcctcagcttcctgagtaggtgggattacaggcaccaaccactatgcccagctaatttttgtatttttaatagagacagagtttcaccatgtctaggctggtctcaaactcctgacctcaggggatctgcctgccttggcctcccaaaatgctggcattacaggcatgagccacacatccagccagcactcagatttataaaacatacttagatacctacaaagagacttagactcccaaacaatgacagtgggagactttaacaccccactgccaatactagacagatctctgagagagaaaaataacaaggatattcaggacttggactcagctctaggtcaagtggacctgatagatatttacagaactcaccagccaaaaacacaatacacattcttctaattgccacatggcacttactctaaaattgattacataattggaagtaaaacattccttagcaaattcaaaagaaccaaaatcataacagtttctcagaccacagtgcaatcaaattagaactcaagagtaagaatctcactcaaaaccacacaactgcatggaaatttaacaacatactcctgaatgacttctgagtaaataataaaattaagtcagaaataaaaaaattctttgaaaccaatgagaacaaagagacaatataccagaatctctggaatgcagctaaagtagtgttaagggggaaaatatagcactaaatacccacatcaaaaagctagaaagatctcaaattgacttcctaacatcacaactaaaaggaaaagagaaccaagagcaaacaaaccccaaagccagcagaagacaaaaaataaccaggatcagagtggaaccataggagatagagacacaaaaaaaacccttcaaaaaaatcaatatatccaggagctgtttaaaaaaaataaaataaaagagatagaccactagctagattaataaagaaaagagagaagaatgaaatagacacaataaaaaatgataaagcagatatcagcactgaccctacattaatacaatcatcagggcttggcgtggtagatcatgcctgtaatcccagcactttgggagggtgaagtgggtggatcacctgaggtcaggacttctagagcagcctggccaacaaagtgaaaccctgtctctactaaaaataaaaaaataaaaaaaattagttgggcatggtggctggtgcttataatcccatctactcaggcggccgaggcaggagaattacttgaacccaggaggcggatgttgcagtgaaccgagattgcaccatcacactccagcctgggggacaagagtgagacttcattccaaaaataaaaaaaaagaagaaaaaaaaaaaaggaaatacaatcatcagaaaatactataaacaccactatgcacataaactggaaaatctagaagaaatggataaattactggacatctacaccctcccaagactgaaccaggaagaagttgaatccctgaatagaccaacaacaagttctgaaattgagacagtaataagtaggctgccaaccaaaagaagcccaggaccagatggatttacagctgaattctaccagaggtacaaagaagagctggcaccatttcttctgaaaccattttaaatgaaagaaaagtaggaactcctccctcattttataagatcagcatcattctgatatccaacctggcagagatataaaaacaacaacaacaaaaacttaaaaccaatatccctgataaatatcgatgcaggccgggcacagtggttcttgcctgtaatcccagcactttgagaggctgaggcgggcagatcagctgaggttaggagttcaagaccagcctggccaacatggtgaaaccccatctctattaaaaatacaaaaattatctgggtgtggtagcgcacgcctgtgatcccagctactcaggaaactgagtcaggggaactgcttgaacccaggaggtggaggttgcaatgagccgagatggtgccactgcagtccagcctgggcgatagagtgacactatgtcaaaaaaaaaaaaaaaaaaaaaaaaaaaaaaaaaaaaaaaaaactgatggagaatgagaaaactattttaaaattaatgtggaacccaaaaaggccccatatagccaagacaatcttaggcaaaaagaacaaagctggaggcatcatgctatccaacttcaaactatactacaaggctgtagtaaccaaaacagcctggcactggtataaaaacagacacatagacccatgaaacagaatagagaactcagaaataagactgcaaatctacaactgcctgatctttgaaaaacctgacaaaaacaagcaataaggaaagaactccctatttaataaatggttctgggagaactgactagtcatatacagagaatggaaactggatgtggtaagaaaaagagcaagtgtaaggtgaaaaagccaggttcaggccaggcgcagagactcacgcctgtaatccaagcactttgggaggtcgatgaggtcaggagttcgaaaccagcctgaccaacatggtgaaatcccatctctactaaaaaactacaaaaattagctgggcatggtggcgggtgcctatatcccagctacttgggaggctgaggcaagaaaattgcatgaatcagggaggtggaagttgcagtgagccgtgatggtaccattgcactccagcctagactacagagtgaaactccatctcaaaaaaataaaaaaggccaggttcttttaatgaaccagctctcatttgaattaatgaagtgtaaactttctgattatcaaaaggctggtgccaaggcatttatgagaaattcgtccccatgacctaaacacctccctaccaggttccacatccaacattggggattacatcgcagcatgaggtttgcagaacatgttcatccaaaccatatcacagacaaactaggcttaacagacatgtacaaaatttttcagttaaaagcaaaataatacacaatattcttatttgcacctgatgtattctgttagaacacataacaagtcttattgaagaatacgtagtggctgatacgcataatttcaacaatttggaagacaaaagtgagaggatcacttgggaccacaagtataagaccagtgtcagtaacatagtgagagcctgtccctagaaataatcaaaaaattagccaggcatggtagtgcatgtccatagtctcagctactcaggaggctgaggtgtaaagatcacttgagtcaagcaggctgaggttgcagtgagccaaaattatgacactatactccagcctgggtgacggagtatgatcatgtctgaaaatgacaacaacaaataaatttaagaagaccaaaatcatgcactgcatggtatctgaccaaaactgaataaaactaggaattaaaagcaaaagtaaaactggcaactccaacaatatctaaaaataaaacacatgggctgagtgcaatggctcacacctgtaatactaccattttgggaggctgaggcaagagacctgcttgagcacaggtgttggaaactagcctaggcaacataggctagtctctaataaataaactgtctctaataaataaaataaaataaaattaaattaaaacacattcttcaacatattcctgctcgagggtcaaaaattttaattttgttaagatgccaatacaacctacagaggtgaacaaattcagtacaatctctataaaaatctcaatagcacagttattacagaaatattctttaaaatttttaaatgtgattgtgaactataactaaccaaacacccatgaaaagaacaaacaggcattatacttcccgattttaaaacattaaaagctacaataacaaaaacagtatggtactgatacaaagacagataaacagatgaaagagcagaatagagagttcagaaatgaacccttgtgtatatgattaaatgatcttccacaaagctgccatgaacacaccatagagaaaagataatcatttcaaaaaatgttaagaactaaatgtcaacactgataaagttggatcatttccttgaaccgtatataaaaaatgttttcaataaaatacttacataaaaaaactaacgaatctcttagaacaaaatagaaaaaagtcatgacatgggtcttggcaccattttcttagatacaacattaaatgcatgagcaacaacagaaaaacagaaaaatttaactacacgctacttcaaaatttatccacattagaaaaaaaaaacattcaactgtgtaaaaatgcctcataagaaatgggtgaaaatatttgcaagtcacatgtgataagagttaatattcgggccaggtgcagtggttcacacctgtaatcccagcactttggaggctgaggtgggcggatcacctgaggtcaggagttgaagaccagcctgaccaaattacaaattaataatttgtagagaaacacgtaaaaataaaaatgaaaaatgaaatcacctcacatccattacaatggccactataaattttttaaagacgccaactctgttgatgatgcaatgaaaatgaaacctctgttgattgttggtagaaaacaaagttgcagtcattattttaaaatgttacatttctcaaataattaaaagtggaattattatcaaatacagcaactccattaatgaatctatattcaaaatatgcaacaaaagacctagaagacatatttgaacatctatgattattgtaccagtactcacaaaagtcaaaaggctgaggcaacccgggtgtctcttgatttatgaacacatcaaaaatgtaacatatacataaaatggaatattatacagacttaaagaagaaaatcttgtcaattttaagacaaactttgagaatattatgtcatctgaaataatccagaaacaaaatgatggacactgtatgattccacttatatgagatatcttaaatagtcacactcataaaaacagaaagtggaagggtgtttgtcaagggctggggagagggtaaaatgggttgttgttacttaatgggtatttagttttaatttcacaagatgtaaaatttctgtaagtcttttgcataacaatgtgaatatacttaacatggctaaaatgcaattattattattattattttttttgagacggtgttttgctcttgttgcccaggctgaagtgcaaggggcaatcttggctcactgcaacctctggctcccaggttcaaggaattcttctgcctcagcctcccgagtagctgggattacaggcacctgtcacaaggccccgctaatttttgtatttttagtagagatggggtttcaccatgttggtcaggctgctcttgaactcctgacctcaggtggtctgcccacctcagcatctcaaagtgctaggattacaggcatgagccaccacgcctggcatgtaaaactttttttttttttgagacagtctcactctgtcacccaagctggagtgcagtggcacaattatggctcacttcagcctcaaacttccaggctcaagtaattctcttctctcaaatttcccaagtagctgaaaccacttgtgcataccaccatgcctggcaattttttaaataattttgtggaaagggaatctccctgtgttgccctggctggtctcaaacttttgggctcaagtgatcctcctttcttgacctcccaaaatcctgggattacagctgtgaggcaccaccatgtctggccttgaaatgtacacttaaagaaatttaagatggtaggctgggcgcggtggcccatgctgtaatcccagcactctgggaggctgaggcagagcgatcacttgaggtcaggaattcaagactaacctggagaacatggtgaaactctgtctcttctaacaatagaaaaaattacccaggcgtggtggcgggcacctacattcccagctactcgggacgctgaggcaggagaattgcttgaacccaggaggtgggggttgcagtgagccgagattgcgctattgcactccagcctcggcgacagagcaagactctgtcccccacccaaaaaaaaaaaaaaaagatttaagatggtaaattttatgttacgtgtttttacaaccattaatttttctttttctttttttttttttttttttgagacagagaattgcttgaacccgggaggcagaggttgcagtgagctgagatcgcgctattgcactccagcctgggcaacaacagtgaaacgccgtctcaaaaaacaaaaaacaaaaaacaaaaaacaaaagttgaagaggtatttcctccatcaaattcacagacaccaatgcaaaactatattgtgcccattgtcaatgcttctattttaacgtaggactggaagtaagtggcagaatgatgagtcaaaaacatttttaaaaagccactgaaattgaagaaaaataagttactttttgtggatcatatgatcttatatataaaaaaaccataaacactacattgaaatttgtctaaagtaataaatacactcagtaaattagcaaaatataaaattaacatacaagtataaactactgttccatacattttaaccatctgatacaataaagaaaacaatcttatttacaatagcattaaaataataaatttctgagaggaaatttaaccaagaaggtaaaaaaaatctttacaataaaagatataagatagaccaggcacagtggctcacgactgtaatcccaacactttgggaggccggggcaggcagatcaagaggtcaacagatcacgatcatctggccaacatggtgaaaccccatctctactaaaaattaaaaaaattagcttggcgtggtggcatgtgcctgtagtcgcagctactcaggaggctgaggcaggaagattgcttgaacccaggaggtggaggttgcagtgaaccaagatcgcgccactgcactccaacttgatgacagagcgagactccgtctcaaaaaacaaaacaaaacaaaaaagatatatcaatgaaataaattattgaagacacaaattttaaaatatttcatgtccatggattgaaagaataaatattgttaaagtgtcatattatctaaagtaatctatagctccaataaacttcctattaaaattccagtggcatttttttccacagtaataaaaaatacaattctaaaatttataagaaactgcaataaacttcaaatagccaaagcaatcttgaggcaaaagaacaaagcagaggggtattatactttataagttctaactatatttcaagaatatagtaataaaaacaggatggaatgtgcaaaaagattaacaaacaaaacaacggaacagaaaacactactttcacacatttcagacatgatgaaaaaagagaactaaaaaatagtttaacatagagtttcccaaaattatgcagatatctgtgtgtccccccaaataatggaaaagtagggagattgtgcagtcttttatatgccttgaaaaggactctggctctcactgtaaacctgaaggaagatcaccaaaaggaaagtagaatctttaaagaatttaaaagcataagacagaagatgcccctacgtgacagccaaaaaaaaaaaaaaaaaaaaagcccaaaaaacaaaaacactcaggcatcccagaaactatttcctttggaacatagcttcccaaaccacattttaatgaccagctttctttttgacctttggacctcacatctgtgtcatctgttgtgttcactctcacctacctgggggtttggctaccatctcatgtctctttatattccagggctcttttccttgctccagacaggtgatcaggtctggcttagtgagagcaatacctgctttattagaaataaataacatgaatctttctcatattctccaattaccaacctagtactatgcttagtaaagaggaggtgatagaatattctagaaaattaatcctaacgtactaattaatgagagaaatttctaaatatttagaaaatattttaaatttgtaggttcttaatttcactacccggtactcatgaatcaaaaaattggtggtgatgaatggattttaaaatatgggcaaatatatatgtacatatatatacatttatttatttttgagacggagtctcgctctattgtccaggctggagtgaagtggcatgatctcggctcactacaacctccacctcctgggttcaagcaattctcctgcctcagcctcctgagtagctgggactacaggcgcctgccaccatgcccggctatttctgtatttttagtagaaatggggtttcactttgttggcaaggctggtctcaaactcctgacctcgtgacccgcctgcctcagcctcccaaagtgctggtattacaggagtgagccaccatgcccggcctaaaaacatgggcaacaatattttatgacactaaatttctggaattaccactaatctagagtgaaggatacagatcagctcaggaatatggaaagttcaggtcaagatgaaacatcttgaatacattcttttccacacacagcctcaagattttcttgaaaaaacggatcagaaactcatttatgcaaagcatgaattaccaaaaatcattccacaaaaaaagagaaacctttacggtatattagaaattgtgtattaaagttattctcacccaagaagaccaggtttctgtagttctctaacatcactttcctatacaaaccctgctgagcactgtccaggcattgccactcctccagagagaattctatggccacatccctaaacgtcaatggcccctgaaaagcacaagcacagagacacacatatatttaccaagtggccatgggcagaatttattatttgaattaaaatgaaatgacagagcaaagagaattggttctgattaatagaaatgacaaattttccaataatttttaacacagaaatattctctaaaatattctctaattctgagagaagagaatggcataagatccacaacaccagtgtatatatgacacttttctagataaagtataaaattaagagcataaacacaaacatatacatttttgagtgttattatttatatcataaagaatgagttgtgtatatttttcagacaaaaaagagatgttgagttagaaggcacctcctgaattttaatgtttacaataaactggaaatcttgtgcagattttttttcagaagatctggaatgaagtctgagtttctgaatttctttcttttttttttttttctgagacggagtctcgctctgtcgcccaggccggactgcggactgcagtggcgcaatctcggctcactgcaagctccgcttcctgggttcacgccattctcctgcctcagcctcccgagtagctgggactacaggcgcccgccaccgcgcccggctaattttttgtatttttagtagagacggggtttcaccttgttagccaggatggtctcgatctcctgacctcatgatccacccgcctcggcctcccaaagtgctgggattacaggcgtgagccaccacgcccggccgagtttctgaatttctaacgagctcactagtaatgccaaagtttttggccccaaaagaaaattctgtgaaacatccagtaagtggaagagcctgtgttttaccagatttttctggcctgtaaaacaaagagccttcattttccaaagacagctacatgcaaagaaaacataagaaaaaagggcagctgccagattaaatgtgatggcttatgcacattaactgcataaagatgcctaataatgacaagaaaaatagttaactctgtagtgaaagaaatatcagagagctttttaaccaagtaaattattaatatcaaccatagtaggacgaatttttatgttgtgcttatgcacatagaagaacatagcatcattgcctagatattgcccctccaaaagtaaattatattctgaattcaatcatacagaaacatcagttttatgcaaagttcaagatacaggtatctccaatgttctgtaattttcaataatgattttaagtagtctttcttcagcaccctatatagcaggtatctctcaatcttttttcagaactttctgggtaataaatgccatcctatttaagtaagtattttcttaatcctgttctgcatagagctaatggagaacacagatggaacctcaacattacatattctccacgtaaaccccagctttccccaataggaatcttgagtatccacatccttccatgttcaacagccacaatgggaacatttttaatagtgcagatcataaattcatggtaggaattctgcatggcatataagaagccatgatattgagaatgtagagaaggctctagtacataggaaagaaatattttgcatagacccttgactatcattagaattttaaaaagtagttaaactcattagtaaggaaaaacacaagtagagaagtaaaggtttgcaaatactaaatgcatgagactctagaaaagagtggacaaagctcttgatgtgagacttacttagctgaagaaaaaaaaacatcatttttcctctttctccttcttctcttggaatccttttcagatgaaattctctaaagaagtaacatctacatcttgagaaaactgccttaaatgtgtcagcaccaccttcttacctgctagcaccacgcccacagacagaaggaccaagaccaaaaagtccacccatacctctcccttataacagaggagattcaggaaaaatgtgctgctccatggatgtaaaaatgtaagtttctcctttcctgtctcaggtgccctcccctgccacaaacaccagcaatttctgctacagtaatgaacatatgggccacactgccctgtccctaccaaacccaaacagaacaggtatcgtaaccaccctttagtgcaaaggtggcacttaactctcatgaatgtatcttgaagccctcatacttcattctggcctcaccttagagtcacatgaggcacttcattaaaataacatggatgcttccacccacaacaataaacagaagctgtggggaaggcacaagagatttttgccaactggtcatgtgatcttaatgagaagcctgggctgataaccacttagctaagcattgcctctcaagctttaatgagctcaaaaatcacttggtaatgttggtcccactttatgtaatgtgattctgcatgtttggaaagggttcatgaatgggtgtttcaaacaagtcccctgccaatgctgatgttgctcccccaggctcatcattagcattagtgagagaaagcaggcaccgcacagagtccctgacattcagcactcttgtcacaacacaaatacttctggtacaaatgaagacaaccacactccatcctgaagttttatattatttgctggctctttaaagtttacagaggaaacaaaaggcagcaatgttggaataagtctgcatttggaaaacaacatgtacacatgtactaatgcaataattattaagcaggtactatgtgctcaagagtacaatatagagcactgtgctgggcataacatattatgtgatttaatccccataacacattggaagttgatactaagtgttcagtaattctcaggatttagataaagggcccagcattattacttcttcctctgtttctctgttattgattttttaaaaaaatgtacagaataaggctaaatatagacagaggagggggcatagaaagagtttaagaaatttttttctatttatatttacttgtctgtgacttgtggagcaactactggatctgcaagaatagaaaacaagctgctaaatggaatgtttctgtaagcactggttttaatacaaaatttaaaaaaataagatgttaaaatgtatagtttatttttcttatttatctgcttttgggttgcaggaaattgtaagcaccagctctagaaaggcagaaggatttaccggccaaaactctgacctttataaatcagttctgtaaggcaagactccaaagtgggccagacctaaagaaggccttcaaaaagggtgaatctgaacagaactggggcagggaaaggaccctatggagaattctgttctctgccactggagtatttccagttctgtttttcctaagcttacctaagaaaaacttaaatcctagagtttatgtaactttaatctatttttgccactgctctgtcaattttataactatactaacaggcaatttaaatgactcttttaaagttttctggaataatttcattagaagataagtatgtattctaacaaagtaaaagatacacaaataatactaacaactcttcagtccataaatatcccttcaggtgataacctcagaagacacaacaatataaaaagaagtgggcaaagtttttttgttttgttttgtttttgagatggagtttcattcttgtcacccaggctggagtgcaatggcacaatcttggctcaacgcaaactctacctcctgggttcaagtgattctcctgcctcagcctcccaagtagctggaattacaggcatgcaccacctcgcctagttaattttttgtatttttagcagagacagggtttctccatgttgttcaggctgatctcgaactcccaacctcaggtgatccgcctgcctcggcctcccaaagtgctgggattacaggcgtgagccactgctcccgactgaagaggccaaagttttgttttgctttgcacacatctattcaccgtaccaaccatatgatgtttaattcaaccgtgtatccagttgctagtctagagcaaaagtttctggatggtagggaccgtgactgcttcatctattttttgaatgaccttatgaaatggaagcaattagtttatcttttgagtcaccggacctcctctttgtgtttcaccaaagtaacagcaaactagagaaactctcatctgggtaccaaccaaagttatctcttgtatgagtatgaagggagaaaaaaaaaaaacagaatgactcatttctcttacaccgagacagaagcagaattaaccactcgtcagcctgaaacaattctgcactggacatcctcaaatgtctcaaagacatctaggtgattgtgagaaggttcttactgaccctgggctgatggcccagtgataagccaggctgagagagattcatgctgattctaaatagaaaatggaactgccttggtggagctccagaacctgcatcacctatcctgacttgctagcttttgggtaagaagaaggacaagaatactctactccagtatcatattttacaggtaggtatagttgtggtcatggctctggatactttgtggccttgatctctcactcttaagatgctcgtttacacttacagattctgtcatcaaattctatttatacctggagtctctcacataactgtagcaggtcactcactaaacaagatctgaaaagcttgaagagccacactctcaaatgggggcttcaagatttctacactgacatctcacaatacagaaaatgccttctgttggttttcagtacattctcaatccaaagtcttctggccctgtcttgtaaatcctaggcagaggccagaccttatgtgcagattctaggtgggatcaatctgactctgcatccttgggtgttacagcaaacagactacaatcaaaggagagctcccctcatagaggctgctctggcacattctaaataatatgtctaactaaaagaaaaaactgaggcaacatgaatataagtagagagttcatctgggccaagcttgaggactgtaaccttggagcaaaaatacatcttccaaagactgaacaaataagaaattgaatccctgaatagaccaataacaagtgccaaaactgaattggtcttaaatggccaccaatcacaaatagcaaagaaccagacaaatttacagattaattctaccagatgtacaaagaagagctggtaccacttctaatattatttcaaaatattgagaaaaagggacttctttttcagctcattatataaaaacagcatcattctgataccaaaactgggaagagacacaataaaaaaagaaaacttcagaccaatatccctgaggagcactgatgtgaaaaacctcaataaaacactggagaaccgaatccaggagcacatcaaaaaacttatccacctctatcaagtcggcttcatacctgggatgcaaggctggttcaacatatgtaaatcaataaatgtaatccatcacataaagagaacgaaagagaaaaacacataattatctccagatgagtcagcttggggaggcggaggcagcggcagcgcggcgagcgtgcagggaggccggagccctgcccggggcgggtcgcggggtgggcgggtgaactgccagcgaggaggcacctgcttgcgcgggtgcagcctgggctgcgccattgttgggggaggggcggctgctgagggcggcgagtagggggctagagaaggcgccagccccggcccagaggagcagagacgccccatggggaacacgctgacctattgcgtgtccccccagtaccagcctcaagctgggccggtgcgtggtgccagagctgtactgcgcaaccgacatctacgaggcggcacccggggatgcggtggcggtagcgcccgcttctgtggagcctaccagttggatttcgcagcgggcgagggccaccacctgcagcacatcagcgaccacgagatgccctaagatttagctttggagtcaaacccttctgaccatccaagggcaagcacaagtttcctgagcaaatctcaaaccgatgtgcgagacaagaggaagagcaaccacttaaatcatctatctccagggcagcttactaaaaagtatagctcatgctcaacaatatttctaggtgacagaacagtcagccagcctaaccttagaaccacagtaaaatgtgaccttagaaatatattaccacataaagaacagagatgcaaacagatccctggatatttttgatgagagatcacatcccctcacacgagaaaaagttccacaggaatagtttaagcatgatcctgagcacaaatttatttacagatttgttcatactctttttagtgctgcacagctaacagctgaatgtgcaacagtaactctggtttacttagaaaggcttttaacttatgctgaaatcgacatttgccccactaactagaaaaggattgttctgggagccactcttcttgcctccaaggtttgggatgatcaggctgtatggaatgtggactactgccagatcctcaaggacattacagttgaggacatgaatgaaatggaaaggcatttttcggagcttcttcagtttaatattaatgttcctgctagtgtttatgccaaacactaccttgaccatcgctccttagcagatgaccacctgaattttctatttgctcctcttagcaaagaaagagcacagaacctagaggctatttctagattatgtgaagacaaagacttgtgtggagcagctgtaagaaggtctttcagcgctgatcaacttcattggtattcagcactctaaagccatcctctcttaaagggagaaatgaggggttataatgtcacgggaccttcatctacaaagactggagaaataccacctttcctgctcaaaaaccagcaaaattagtgttttcatcaaaaggaaagatctcaaattcaagagacgcacggacaacaaggatcatactccatagaaaagaatgggaccttgtcaatgcaacaaaacactcttctgtcctttttaatgtaaacagagtcaccaaaaccactccaaagtgaaggctcccatcccacacacagatatttgcttacaatgtgggccagtaactgaactatgttaggttttttaaacaatagtttaaatttttagactttaaagacattaaccatataacttttatgtttcttccagtttttctccccctgctcattttgctgcatatgcctttagaatcaatgcagtattgcccttaaaacaagggactctaactaaagccacttaggagcagactgcagcattgttaggtattgaagggttcttcctccctactgttaccattaaagctgctagtcattggcaatcattttaaaccaaaaagctgatggataacatttgtcattcatattctttgcaagcattactttagcattttagcatgtctgcggtcataaacaaaggaagtatcagttatgatatctacttctattggggtccatgttgcatttcttgtgaactataaatggtacttctcattttctgataatttttatcttattaaataaatgtattaaaagatattttcataatgccaatgaacatggtggttcagtgacagtgaaaaaaaagtaaagcagttttaagctttaatatagtttgggccctccaaggtactgcagcaggagtataaatgctataaacctttgaaaaacatcatttgagagttttgttttttttctttaagagatgggggtcttgctgtgttgtccaggctggagtatggtggctgttcaccagtgcagtcatggtgcactgcagcctagaacttcctggcttcgcgccatcctctagcctcggccacacgagtggctgggactgcaggcgcaccctgcatttgtctcctgaatgttaggcttttgattttttgtttcagtcactcttgaagtcactcttgactgaagcaaaaaattaaaagctttatattcaaaattctcaaaatgaagctgggtgtggtggtgcacacctgaggttccagctacttgggtggctggaggattgcttggggtcaggtattggaggctgcagtgtatcgtgatggtgcctatagaaatagctactgcacttcaacctggacaacatatcgggaccccatctcttagaaaaatgcaaaattaaatgcaaaagaaatgcaccgggcatagtgattcatgcctataatctcagtactttgggaggctgaggtgggaggattacttgagcgcagcagttcaagaccagtctagtcaacacagtgagcccctgtctgtaaaaaataataataaataaaaataattagctggatatggtggcgtatgtctgtagtcccagctactctggaggctgaggtgggaggatcacttgagcctgcggggtcaaggctgcagtgggccatgatcatgctactgcactccagtctgggcgacatccagaccctatctcaaaagaaggaaaagaaaaacattcaggcaaggttttatgaaggtttgtagcacttctacaagtatcaaagcttaaaattacattaaacctttggaatatcttgtatctccataaaatgcccttctctttttaaaatgaattacttgcagagctgtgctctatatgcattgatcaccgaagtttctttaatttaaaggaagattttgaagagcactgttaattaacatgtaataaaaggaactgggccctaatgatagaaggtgatatgaacagctgttttatcatcctacatgctaccaacctgtaggtgtcccattaagtcctgctatttaagaaataacttacataacccttaggaacacttacttcaggctttaaaaggcaaggaacaaataattttaggagactgataatgccatctaaatttgaaaaactaaaaggagattagtgttctcaattatgtgaaatctatttctcctacttactcaaatctaatcctaggaatcttgcttataaacaaagcattcctgggccaggaatacttcctctactatagcaatatttcacatcatattgtgctgcaatttccatcatttttaaagggcagagaaataaatgataaataatggtataaaaatattacaatctaccacctcaaaaaaaaaacaacaaaacattgtttatggagttcagagcttggagagtcaagtattgatagctgttttattttaaaaagaatgttacaatttatgtggtttttatttctcatgtttatattaaaagttaataaactcttttaattaaaaacatatcattatttcaatagaaaaaagcctttgataaaattcagcatcccttcatgttaaaaaccaatggaacagaacagagacctcagaaataccaccacacatttacaaccatctgacctttgacaaacctgacaaaagcaatggggaaatgatcttctgttaagtaaatggtgctggggaaactggctagccatatgcagaaaactgaaactggaccccttccttacaaaattatacaaaaattaacttatacaaaaagtaactcaagatgggttaaacacttaaatgtttaaccataaaaaccctaaatgaaaacctaggcaataccattcaggacaaaggcatgggaaagacttcatgacaaaaacaccaaaaggaatcgcaacaaaagccaaaatttgacaaatgggatctaattaaagagcttctgcacagcaaaagaaaaccatcatcagaatgaacagacaacctacagaacaggagaaaatttttgcaacctacccatctgacaaaggtctaatatccagaatttataaggaacttatacaaatttaaaagaaagacaaccccatcaaaaagtgggcaaaacatgaacagatacttctcaaaagaagacatttatgtggccaacaaacatgaaaatacactcagccgagctcacgcctgtaatcccagcactttgggaggccgaggcggctggatcacctgaggtcgggagttcaagaccagcctggccaacatggagaaacccgtctctactaaaaatacaaacttagccaggcatggtggggcatgtaatcccagctactcgggaggctaaggcaggagattcgcttgaacccaggaggcagaggttgcagtgagccaagatcgcaccattgcactccagcctggccaatgagagtgaaagtccgtctcaagaaaaaagaaaaaaagaaaaaaaaaaaagctcaacatcactgatcatcagggaaatgcaaatcaaaaccacagtgagatacatctcacaccagtcagaatggtaatgattaaaaagtcaagaaacagatgccggtgaggctgtggagaaatagtaacacttttacactcttggtgggaaggcaaattagtctaaccattgtggaagacagtatggtcattcctcaaggatctagaccagaattaccatttgatccagcaatcccattactgggtatatacccaaaggaatataaaccattctactataaagacacatgcacatgtatgtttactgcagcactatttacaataacaaagacatggagccaacccaaatgcccatcaatgacagactggataaagaaaatgtggtacatataagccatggaatactatgcagccatcaaaaggaatgagatcatgtcctctgcaggaacatgaatgaagctggaagccagcatcctcagcaaactaacacaggaacagaaaacaaaacattgcatgttctcactcataagtgggagctgaacaatgagaacacatggacacagagagggaaactacacccacagggcctgttgaggggtgaatggtgaggagacagaacatagaggacgggtgaataggcgcaccaaaccaccatggcacacatacctatgtaacaaacctgcatgttctgcaagtgtatctccctgcttttttagaagaaattttttaaaagaggaaaaaaatgttacttatcacataaaccaaaactaaagacaaaaaccacatgattatttcaatagatgctaaaaaagccttcaatataatttactatccttcatgtttaaaaccctcaacaaactaggcattgaaggtacatacttcaaaataatgagtcatctttcacaaacttacagccaacatactaaatggacacaagtgagaagcattcctccttgaaaactggcacaagacaaggatgccttccctcaaaactcctgttcgacatagaattggtacagtctcagcagaaaagctctttaaactgaaaagcaagttctgcaaagtttcaggatactaaatcagtagcatctctgtacatcaacaacatccaagccaaaagccaaatcaaaaacataatgccattcacaattgccacacacacacacacacaaatatcgaggaatacagctacccaggaatgtgaaagatctctatgacaagatgatcaaacactgcttaaagaagtgagagatgacataaacaaatggaaaaccattttatgccatggatagaaaagattagcatcactaaaatgtcaaaactacccaaagaaatttactgacttaatgctattcctatcaaactaccaaaaacattgttaacagaactaaaacttaactattttaaaatttatatggaactaaaataagcctgaatagccaaggcaattttaagcaaaaagaacaaagctggaggtattacattaaccctcttcaaactacactacagggctacgataaccaaagcagcataatactgatgcaaaaagagatgcatagaaaaatgcaacacaatagagaggccagaaataatgccacacacctccaactatctgatctttgacaaagctgacaagaggaatgaggaaataattccctatttaataaatggtgctggaacaagctgggagaggtggctcacacctgtaattccagcactttgggaggccaaggtgggtgtggatcagttgaggtaaggagtgcgataccagcctggccaacgtggtgaaaccctgtctccactaaaaatacaaaaattagctgggcaaggtggcacatgcctataattctagcactttgggagcccaaggcaggtagatcacttgagatcaggagtttcaggccagcctggccaatactgcaaaacttcatctctactaaaaatacaagaattatcagggcatggtggtgcatgtctgtagttccagctactcaagaggctgaggcatgagaaatgcttcaacccatgaagcagaggttgcactgagccaagatatgccactgaactccagccttggtcacagagtgagaccctgtctcaaaggaaaaaaatagtcactaacagatactggcaaggttgcagagaaaagggaatgcttttatacactgttggtgcgagtgtaaattagttcaaccattgtgaaaagcagtgtggcgattcttcacagaactaaaaacagaattaccatcggacccagcaacctcttaactgggtatatattcaaagaaatataaattattctaccataaagtcacatgcacatgcatgttcatttcagcactgtttacaataacaaagacatggaataaacctaaatgcctatcagtggtagcctagattgaaaaaaatatggtatggtcagatgacagagctcattcttgtaatcccagcactttgggaggccaaggcaggtggattgccttagctcaagagttcaagacgagtctgggcagcatggcaaaaccccatctctacaaaaaataaaaataattaggcagacatggtagtgtgtgcctgtagtcccagttacttaatgggctgaggtaggaggaccccttgagccttggaggttgaggctgaagtgagccacaactgtactgcacttcagcctgtgtgacagagtgagacactgtcttaaaaaaaaataaagaaaagatttaatagaaacaaaatatggtacataagcaacatggaagactatgtggccataaaacaaacaccaccaagataaagatctctgcagcaacacggatggcgctggagaccattagccttagaaaactcatgcagaacacaaaaccaaatgcatgttatcatttgtaagagctaaataataagaacacatggacacgaggaacagtcacggggcctagctgagaatggaggatgaaaggacaaagaggatcagaaaaaaatacctctttggtgctatgcttagtacctcagtgacaaaataatctacaccaaacccccatgacacaattttacccatataacaaccctgcacatgtacacgtgtagaaaaagaaaatccatgggtggggaagaatgcagtgtaagtggattgtttgttctacagacagtggcccaggtggcgctgtactctgatttatttctgggtccatgcaggcagagaagattatgaacaggtagtccaggaccctaggctggtggagaaaacaggttgctgctgcagattcattgtctgggggttgggatatgccaggagacttgtggacacttttgtggctttttggcaagaaatactaggatccacaacgctgtagtgaaattcccaagtgtggtgactagtcctgggaggggtgtggacacgtcaatgtctagtgggtatgtttgtgagtggatcagaatcctgtggtgatagctgtggaacaagggggtctgtcatcagagttcctttcctctaagttttcatcctctcttaccctagaagatctggaatcacacgacaatgaaaggctttgttctcctttagacgagaacagagcctcccactccaagacaccaagagttccattccaggccaggtctccatgatatctttcttctaccaccaaaactgcagagtttgctgaataccaagcaattctctagcaccaactcaatgtctaacattcgaattctgacaccatgcagagtcagcaaagaccctgattcaaggtttagtctcataacattgccctctttgcagttgccagtcacaaaccccataggcccatctatgtttctgggctactgtttaaaaactgaggactcctgcgaccttcctcaagttcaataatttgatggagctactcacagaactcagcaaaacactgcagctatgtttacagattataaaagatacaacccaggaaaaatcaaatagaagaaatgtatagaacaaaaagaagaggtggggaaagatgaaacatatagataaccctggtaaatagctgtgattaataaaatttttcatcctctgtgttctccaggaacagtttatggaaagaaacactcttccattatgaattacacagtgctctcttttcttttttatcacatagccacagactattgaactagagcaactcgattttgaatatggctgagtaaaataaggctgcaaccactgggctacattcccagatggttaggcattctaagtcacaagatgagactggaggtcagcacaagatacaggtcataaagagctggctgataaaacagtttgcagtaaagaagtgggataaaacccaccaaaaccaagatggtgatgagagtgtcctgtggtcatcctcactgctacacccccaccggtgccatgacggtttacaaatgccatggaaacatcaggaagttacaccataatggtctaaacaggagaggcataaatattccacttcttgtttaccataaaattaagaaataaccataaaaatgggcaaccagcctatggagaaagccattctcttatatctccactttcttaataaatgtacaggccaggtgcagtggctcacgcctgtaatctcagcactttcggaggccgagatgggtggatcacctgaggttgggagttcgagaccagcctgaccaacatggagaaaccccatctctactaaaaatataaaattagctgggcgtggtggcacatacctgtaatcccagcaactcgggaggctgaggcaggagaattgcttgaacctgggaggcagaggttgcactgagccaagatcgagccattgtactctagcctgagcaaaatagtgagactccgtctcaaaaaaaaaaaaaaggaaattgctattattctaatatgactaagtgtatgttattaataattacactttgggaggctgaggctagcgagtcacctgaggtcaggagttcaagaccagcctgtccaacatggtgaaaccccgtctctattaaaaatacaaaacttagccctgcatgtgatggcaggtgcctgtaatcctagctagttgggaggctgaggcgggagaatcgcttgaacctgagaggcggaggttgcagtgagccaagattgcaccactacactccagcctaggggacaaagcaagactccatctaaaaaaaaataaaataaaataataataataattacattgttacctaaaatcattgtatgccacagagctaaccaaatttccttgtcaattttttttttactgtaactgccctaagactttgccatccagacaatcatcttgtgttgatcctcttcaaaagatgatttgtagtccactataagacaatgataggtgttcttaaatgcaagtttctgataacattagaaattgtgacattagaatagaggaagaactttcttgttttttttttttttttttttgagatggagtctcactctgtcgcccaggctggagtgcagtggtgcgatctcggctcactggaagttccactttgcagtttcatgccactctccttcctcagcctcccgagtagctgggactacaggtgcccgcaaccatgtcccactatttttttttgtatttttagtacagacagggtttcaccatgttagccaggatagtcttgatctcctgacttcgtgatctgcccgcttcagcctcccaaagtgctggcattacaggggtgagcaaccgtgcccggcctgaggaagaactttcaatactaatggagaactaaaatggtcatgactatcaaacagaacaggaattaactgagtggactgaactaatagaagactgaagtaatattttttgacttcgcctaaaacatcactgatcctttgttttgtttttcagagtcaaaaaaactattcttttgaactattcacaccttttaacaattgagtaaagtatacacctgtgaaaaaaatttggaaaatatttgtgagtattctgaacttaaaacaatttagttatttatataagtgcaataagaaactgttttcttttacaacaggacacaattagagaaacttgttattttaccaaggcttctgactagaatgacatactttgctttaatgaactaaacttgacttgtagaaccaataaagctccatgggaaaactggtattataccttgtctacacagcccctgtacagggttcctggctagcggtaaataaaaaaatttcttatctgagattccttttatgaaacaaggttccatcaaacccaatttaaaaggcctatgtgaaaaataattattcttgctacactttatagaaataatcgggccaagtataagactaaaactttttttttttatgttcacacttcacattgtcttatgtttatttgcagttatttttgaacttgaagatggcatatcttccagccatagcagttcacttcttcatgttaatttggtggctaacacaacaggtaatatccaccacccactcccaacctacatcctgctgatcttgctttgctcacatcttggagacaatagagttcacagagttgagtctgtggctagagccggtcagaaagcatgaatctgaaagatatttttaaaatagcactagtaggccaagcacagtggctcaccagcacttgggagaccaaggcaggcagatcacttgaggttaagagttagtgaaaatacaaaatcagctgggcatggtggtgtgcacttgtaatctcagctactcaggaggctgaggcaggagaatcacttgaacttgggaggcagaggttgcagtaagccaagatcatgccactgcactccagcctggggaacaaagcaagactatgcctcaaaaaaagaaaaaaaaatagcactcctaaacaaaacagtcacaaagcttagctttctctttctactactaacagtgtcataagatggattatgtaaaaatctggattactgtttgaattatgaagacatgacaatcagccacgacttcctatcagcttggttccaacaaatgcccagttcatgaaaagctttcttaagtttccttggaagaattttgcttattttgctttactgttgtagaatatattgccattctactccttgtgtagaaatgcagaataaacttactgggtgttttcttaaagtgaacacttattaatcttccagatatcacctattgttggaactgggagttaggaatggccgtcatcaaactgatgctttctgattgagctcctctctacctcaaatacaaaagacgctaataggcaagaatatcatcacctctattcagcatgaagtagtaacagaagattgatcttcgtcccactacaacccttaggattaagggtttccttgtttaaaaaaataacaataataatagagggggaaaatgtcagaggcatattgaaccaaagcaaatccattttgaatagggcctgggtaaaacagggctgagatctactggcctgcattcccagatagttaaccattctaagtcacaggatgagacaggagatcagcacaaaatacaggccataaagacctggctgataaaacaacttgcagtaaagaagtgagataaaaccctccaaaaccaagatggtgatgagtgtgacctctggtcatcctcactgctacactcccatcagtgctatgagagtttacatatgccatggaaacatcaggcagttaccctttagggtccaaaatggggaggcataaatactccaccccttgtttagcaaataatcaaaaaataaccataaaaatgggcaaccagcagtccttggggctgctctgcctgtagagtaaaccattcttttatttcttattaataaacttactttcactttatggactcaccttgattcttgagtgaaatccaaggaccctctcttggggtttggattgggacccttttcggtaaaatctctgcacatattttttctttttctcatgaaaaaaaattggctaaggctggcgtggtggctcatgcctgtaatcccagcactttgggagaccgaggtgggcagatcacaaggagattgagaccatcctggctaacatggtgaaaccccgtctctactaaaaacacaaaaattagctgggcatggtggcacgcacctgtattcccagctacttgggaggctgaggcaaaggaatcgcttgaacctgggaggcagaggttgcagtgagccgagattgcaccactgcacttcagcctggcgacagagtaagactccatcccggggggaaaaaaatcagctaaatttgtcttcagtggtctaagtaaaattttacgtgggctcctgaactttgagctaccctcaatctgagctaacttaaaacttcattctgtgcccctcctaagaacatgctgacttcagggtaaaacattctctaatctaaaatctaaccttttcaatctccaactgccattcccttcccaccttctctctaatcttttttgctccactgtatgaaagaaagccctcgtctgcctaaacttggcaattcttaaagtttttatagttggtattcctcctgttctaatacttttttggaattcaaattttttaaataaattgaacttggttatacattacaaagtctagaaactgccttaaaacaataacaacttcatcatcagcaagaccctcccaatccccttttatgttaaccttaactgcatctgcctgtgagcccccagctttccaggactctgtagcttctctcagcagataggcttcttccatggctgcagtgagaaggctgggacatctgcaggagagactccccagaaaaaactaacaaggccgttattaaatttcttctgcaggctcaatattagccttagctctgagtcactgggaccaagctctaatttccatgttaagagttattcacttggttgttgaaattaagtgtctgaaaaatccagcaaaatgcagtgttcatataagggaagggaattttaaggtgcttacattttatacctcaataagaaaagcaaaagtatcaggccgggcatggtggctcatgcttgtaattccagcacttcgggaggccaaggcgggcagatcgcgaggttaggagtttgagaccagcctgaccaacatagtgaaaccccgcctctactaaaagtacaaaaattagccgggcatagtggtgcgcctctaatcgcagctactcaggaggctgaggcaggagaatcacttgaacccgggaggcggaggttgcagtgagccaagatggtgccattgccctccagcctgggtgacagaaccagactccgtgtggggaaaaaaaaaaaaaagcaaaagtatctatttctttcagacaataaacgtattactttattaattccatttaaaattattttgtaaacaatgagtcatatgggagcacttctaaacagtaccgagtttcatctcataaaatttagcataaaactcaaaaatcaatgtaacaggatctgaacacagatattcactgtcacaaatttaccctgaaaaaaaagaaactgatgttttaatgaatctatgtaactcaccaattatccaccacattttcttgtggaaatgtattcattttccaaaactaaaattgagagattttgcctgggagcattctaaaagctaagccttgaaattctgtttgaaatcactcagccataaaaaaaacacacctgagaaaattcctaactcactctgggaaaaacagtaaatgagaatttttaacaaatttttgacaaatgaaatacatgatcagacatttttttctgaaacccacctctttcatgacctttgtaaatatttttctacctttcaagccctactaatataatgcaatttacagctaaaaaactgaggtcaaaataagtgacaaatatcttcaaggtgacaaacccaggtagtggcagtgctgattaaataacagatgtgtctgactcatgtttcaagtcaggtcattcaatcactggagagattcttccacccactcctgctcacttatgtgctcaagaaccacccactcagaagacactgcattatgccccagtgactgccccaggtgcattttactttgcaagctcttacaccatctcactggggtcagttctgttgttgtttgtcttttggaatactttttggtaacaaaattttcacttttttttccaatatttttctttatatttatttcactatttttctgccccccttagatgatccagggagcagaaattatttttgtgtttcccctcaataccagcatctgattggctgaccagcaacgtgtctccaagaaatgaaagctgggttgggtgaagacaattttaatgtctcaaggggttaccttttcaaaataagactgcaccagaagactcctctcagccccagggcatccacttgctcccttgagaggacacattccatacctcgggtcatcctacgggagaaaataaaccagaagctgacattcactaggcactttagctgacagaaccatggcggatatctcggtttatccacagatagtactgaaacccaggaccaggaaaaaactaaagggtggctgaggacacatcaccccatagatttttccaaatcaaaaccttgacccaaaaacattctgataaatctctgtgcctagagaaggtaaaaggaaaagagacacagagattttctacaatacagtgtcagaggattagtctttgtttccttttcgtgggaaatatttacaagcggataacacatcttcttaaaagcgccatttaatgctttgtcaaaaacaattaattaaaatatggtataaacaagtacactaaaggacaaataggtgataatgtgaattaggaaggaaaagttgacatttgggaacgccagaagaaattggaaatttagtatcttactgcaagccagagtgaggctggagaaatgggggacgggggttagacttaacaacctgcttgggacacaggtgaaaaatgcagcagaaaatcagttccccgtggagtgtgaaaataattaagagacaggcaattccactgaggtgtctctagtccctgggttcctacttaaaaaaaaaaaaaatctaactcaggtgcattttttttttaattactacattcagagaaaatgtaggcttaaacaactataaactgttaattaacctctgattacacaaccaggaaatcttcacctgtattgtacaaatcaagaaactacgttactgtaaccaattactaaatttagttttcttcatcatacattttataaatgactttccttcaagcctctcccatagacaacaaactacaaaccatagctggatactctatgattcttgaatcactgtttgattaaattctttaggccaggcgcggtggctcacgcctgtaatcccagcactttaggaggccaaggcgggcggatcacgaggtcaggagttcaagaccagcctggccaacgaggtgaaaccccgtcccaactaaaaatacaaaaaaataaggccggcccagtgacaggcgcctgtaatcccagttactcgggaggctgagccaggagaatctccagaacccgggaggcggaggttgcagtgaggggagatcgcgccactaaaccctagcctgggcgacagagcgactccgtctcaaacaaacaaaaaaatcgttaatatttgtgcagtgactcccatacatttttaataggagaaaagaggaactgggaaagccacggaccaaagatcttcccattcatgaacccgcaccccgagtcaggattttcccctgacgaccctcccgtggtccctgcacaatctgagagagacgcggcgctgcgggtgcagagctgccaagagagggctccaggccaaggcacagtcactacgcagggaagagaaaggacgcctggggtcctggctgtcagcgcagccgccatcttatggccgaaggggacggaggccgagctgggcaaggcgcagattgtgaagctgactgcggagaggcctgagtcccgccacagctacttcccaccagttccaaccagccctttcgccgtctctcgggatgtcggaccgggcactctcaccatttctaggcttctagggggtcctggcgtcttagctgtggatctcccaatatctgcaggtcagagggccacacaggctaggcccctaggagcagaagacacagagaagtgagagcaaaacctggagctccggctacagcgagagacaaagaccccgccaaacccggaagccgtccagtccgctccagctgcatgcctgattggacggtttccagcccagcgtccctggttggataatgcttaaatccccgccctgtcaggctttgagtgacagaagatgtgatcagatgcgggttcaatgaagaaagagtgacagcctagactgccccctcttctgacagggcttcctccctcagctgagctaggcccatcccagagagtatttgcctttaaatttgtgtataaggtcatatgtataaataaataatacattatatagctatacacaagtgaaaagaatataacaattattttaaaatttcagcttttatgaccttcctggcttctggccctttgagcaggcagcctgagattttagaaaagagaaaatcatctaaaatgaatgtcagccacatgtggatttgaaattttctagtagccaaactttaaaaagaaacaagttgaactgattgttaacaatgtaattcacccattatattcaaaatattatcattttaatgtgtgagaaatatgtaattattgataaaatatataaatatttggaactaaatctttgaagctgactttgtattttacctttctagcatatcgcatttcagaccaggcacattgtgggaacccagtagccacacatggacaatagctgtcacattgaagtgcagctctgatgtcagcggtgtgaagggcctgaacatctctttcctgcgagagtgaaagaagagactctccctacaaacatctctctttggttcctagggtggaccagatagttcccatagaaagagctgagggcagtaggaataaaatagccacaggtaataaacaactgctggccacctgttgcccacctttcttttagagaccagatagtgaacaaaggatgatggggccacaggagaaaaaacaactatgtcttcagttctgtccacacacttgaactccagtatttagagatggagaaaatagattaaaaacaaacatagtttgctatatggtcttggccctaacaatcaggctgtgtttatctgttttctcctgtggtgtgggggactatgtgagtctaagcaccaatcacacgcatacatgtctacaggtatttctgcattacccaaaattctcttacaaaacatcgaactttaaatcaggggaagaaatcagtacctagagggtgtccactgttagaagccaactcttagtcaacctgtcactgaatcctggcaacttatctgtactgggtgcatgtattagttagctattgaggcataacaaatcatccaaaacttattagtttataattgaaatggttggccatttaggccgagctgagtggggccattcttctggtctcagctgagctccttcagacatgtatcatcacctgctttttgactagacagctgtgcatctgggggtgagcttctgctcctgggtctgtcaacaggggcaccttgcttctcctcttcatggtatcttattttccagctggctaacatgggcattattcatggagatggcagcattctaaaagaaaaagagaagcagtcaataccatttgagcctgggccccaaactggcccactgtcatgttcacaggtttctgttgacctgagcaaataaggtcagccagatatagggctttgaaaacagattccagatcttgatggaaacagctgtaaaagcacctggttatgggcaaagatacaagagggatgaaaaaatgtcattttgcaatcagtatcattctaccttttttgcatatgtggtatatagaactcttccacatcaggaaacttgtgcaaagtcctacggctactaagtggctgggctgagactcaggatcaactttatctgactccaaagcccatgcacctccatagatgacactactaaagtagctgccctgccctagactattgaaatcctggagagtgacacttccatagtagaagtcagattccttttagatttgtgctcatttgggaataatcctcacaaaaattgcagaagcacacggtggctctcacctgtatttttagtactttgggaggctgatatgggagatttatgtgagcttaggagttccaatgcagcctgatcaacataataagattctgtttccatgacaaaaatgaagaaattagccacccatggtggtgcatgcctatagtcccagatacttaggtggccgaggcaggaggattgcttaagcctggaaagtcaaggctgcagtgagctatgagtagttacaccactgcaatcaagactgggtgacagagtgagtccctgtctcaaaaaaaaaaaaagaaagaaaaaaattggagaagcattttgaaaagatataaaataatttggggaaataactgaaggatgagtttagaaaatcaaagaccaacaacacattatttatttttcatcatagaaaatagttgaaatccattaaaaggaaaaatctttagagaaattaataaattttttaaatttattttttatttttgagatggagtctcgctctgtcacccaggctggagcacagcagtgcgatcttggctcactgcaacctcggcctccccagttcaagcgattctcctgcctcagccttctgagtacctggattataggcatccgccaccacgaccagctaatttttgtatttttagtagagacggggttttaccatgttggtcaggctgctctcgaattcctgacctcgtgatctgcccaccttgtcctcccaaagtgctgggattacaggcgtgagcagcagagtccaattgagcatggaatgatttgcagattgggtagcctgtggatccagagtaggcgcagagagactctagcacagccacatgatgaaaacagattgatagacagcaaaagcaaagtgacatacagaaaatgaaagtgaggtacagaaacagccagattgattacaggttgggatttgccttatttaatcatgatttgaacacttgatgttcttttattggcagaagcacagtggttggtacaataatgggttacagtctatttatatatccagttaggtttcagtttactatgtacaaaaaaacctagtgaccaaagttaaacaggaaagggtgcagctttagagataattaatttaacaatttctcccttttggtcacgttctcaattttgagagatagaccaaaactttagacattgatattactctgtcaccatcaaaagtgtacttatttagtctcaaatcccactatgaaatagcagaactgtgggttttaaaagtggaaacaaggacttcacgttatttgttttttagggttgcagtagaggggaccatcttgtatcgaaatctgctgtttccaaaataaaaataaaacctaccctgttttaagatctacctatttacttaaatttttaatttgattatttcacatttagcatgagtgactccatttactttgatttggtctgtttgggcctagtgcacaaggtcagtccagaataatggcctccaataattttgtttaaaaattttccaccttttggttaagttctcaaataggtcagagtgtgactaaaactcagggtcttagtgtcactctcagtttctattatttttggtttttgtttttatcagttcattcataggttatggtgtcctcatggtcacgtatgtatttgactttttgtggttccagttaaagagagactatttcacattctagagataactgcatgcaaacttcaataacttttgagagaatacagtgcagtagggagactactattttgactatctgggggtaataaccaaaagtttcaagtatgctttttagtcagggtcccatgaacccaccaactaaaattaaatagatcaaataattagctacataaatgttctcctcatttcaaacaagcagcctattcactaatctcctacaactgaatctctgtaatacctggtgaatttctctatgtgcaactataagtattagcaacttcacagatacttctctgtttatccagtaaataatctagagaaattctattatttaccacaattttactaagaaaaattaaagtctattgtgtaaccatagcctttacaatagaatttgctatagagccctattatggggaataaatttctttttttctttttttcttttttttttccgagacagagtctcactctgttgcccaggctggagtgcagtggcatgatctcagctcactgcaacctctgcctccaggttcaagcgattcttctgcctcagcctccccagtagctggcattacaggcacacgccaccacgccctactaatttttgtatttttagtagagatggggtttcaccatgtcggccaggctggtctcaaactcctgacctggtgatctgcctgcctcggcctcccaaagtgctgagattacaggcatgagacactgcgccagcatagggaataaatttttaaccattgcctcatttactctaaaccatgggggaaaaaaagacctaacaagtgatacccattaagaagagtactggcctcctggcaacactctgtaatctattctgaataagttctctttaacttataaggtaggttaagagcagtggacaaatattccatttttgatattatgaggcaacagatgtcctattaaaaattctcaccaggccgggtgcagtggctcacgcctgtaatctcagcactttgggaggctgaggcgggcagatcacgaggtcaggagatcgagaccatcacggccaacatggtgaaaccctgtctctactaaaaatacaaaacttagctgggtgtgatggcatgtgcctgtaatcccagctattcagcaggctgaggcaggagaatcatttgaaccatggagtcggaggttgcagtgagctgagatcacaccactgcactccagcctgggcaacagagtgagactccatctcaaaaaaaaaaaaaaatctctcccatattggcccttcgtcttttacctatcaaggcataagtttgcccatatagaaggttggctgcaaaatcattttcatgtaaaagtgtagctcatgaaggcacacaagtgaccccttttttatttctgtcatttggagagccataagaaaaaaacagtggactaagagtgtcgtaatagcagagatgtctttcttgatttttttatcttgttaaaaaaaaagctatctatgttaatgttaccatctgcttttgaggagaagcttccctgcttagctttactttaagatctccaatgggtatacaattgcaagtttggaggggcccttctgagtcatgagattatcaaaccaaggtttaaagtcctgaagtcttgctgcagtgtagatggcaggcagactcaatctctctggtttctaaattataaagggttttatagtattccatcagtaaaccattaaaagcattctttacctagtgaaaatatgctttgccgtaatgcattaaagctttgctgcatttagtcatattagacttcagtagcagaagatacatgaggttcttttatcaggtgcataagccttccaatgactattttacaatcgtcaacacattttttcactctcagttaacctgattgtcatcaatctgcaactacaaaagcaattctgtcaatttagttaactttgctcaatattactgtttctgtaataccttatttaacagttttataacatgtctagtaaaataagtatccctattattggagactttttaagaaatgtttcacgagcaaaacatatttcctaatattattttggctactgttataacatcaaactttttgcatgagaaaacttttttttttttttgagatggagttttgctcatgttgcccaggctagagtgcaatggcacgatctcggctcaccacaacctctgcctcctgggttcaagcgattctcctgcctcagtctcccaagtaactgggattgcaggtatgtgccaccatgccctgctaattttgtatttttagtagagacagggtttctccatgttggtcaggctggtcttgaactcccgacctcaggtgatccacccacctcggcctcccaaagtactgggattacaggcgtgagccaccatgcccggcctgagaaaacttttattctacagacatgaattaaaaatgacaattaaataaaatttctttcctttttttttttttttaaagcagaacctcgctctgtcacccaggctgcagtgcagtggcataatctcagctcactgcaacctctgcctcctgggttcaagcgattctcctgcctcagcctcctgagtagctgggattacaggtgggtgccaccatgtccagctattttgtatttttagtagagacagagtttcaccatgttggccaggctggtctcgaactcctgacctcaagagatctactcacctctgcctcccaaagtgctgggattacaggagtgagccactgcacccggcctaaaatttctttacaaatgtttaaatagcccattgggtagcagaaatgtacatgaagttttgattgtcttctcgggattctgtttgacaaaaaaaaaaaattggtcctaacctattttagtaattagaataatcaccaaacacacacacacacatacacacacacacactcaatttatatttagcttaatttattttttatctcttctgtgatgagtaattaaatgcagtgattttgatagaggaaactttaagaactcagaaataaacaagtggctgttggctgtctaggttctccatgagtccacacacaacattaaatttatgtcctcttcaatatctggtttgtttcttcaattcaggtgcatagcactgataactgagaagttatcatacataatttgacttgtaccacagagtttattcaaacggcatatctaaaacaattttagtactggctaatttagtataaaaatgtggtagagtattttcatgatgttcaattaatttttgttttgcctggattagtagtttcataagagtcattctcttcattagaattctcacaattcttacccagtctaaacagtttgattgtaaaattatcagaaacttgtactcaacttgtctgggtcctttccatcttttcataaaactatgctaaaattaattcattaactgtggaaataacttaaaatagttataaagaaacaaatgaaaaaattgattttatctgtgtcctacaataacctatcataataaccataattatgactaatagcatatactcagaaatttcatacaattttcaaataaatgctaatagcacttattaaaatataagttgaaggtcagacatcatttttaatgttatgatgccttccatgtaacttaacatatcaaataattctgatgattactcttctggatgttgcattagccctctgcagcatctaaaagttaagggtcaaagaaaagacaattattaagcggaaatttcattctggaaaacctgtcaaatatgtcaaagggttaaaacacttgaccagatatataaaaattggctctccctctccctctccctctccctctccctctccatcaccctgtccctctccccacggtctccctctccctctctttccacggtctccctctgatgccgagccaaagctggactgtactgctgccatctcggctcactgcaacctccctgcctgattctcctgcctcagcctgccgagtgcctgcgattgcaggcgcgcgccgccacacctgactgtttttcatatttttttggtggagacggggtttcgctgtgttggccgggctggtctccagctcctaaccgtgagtgatccgccagcctcggcctcccgaggtgccgggattgcagacggagtctcgttcactcagtgctcaatggtgcccaggctggggtgcagtggcatgatctcggctcgctacaacctccacctcccagccgcctgccttggcctcccaaagtgccgagattgcagcctctacccggccaccaccccgtctgggaagtgaggagcgtctctgcctggccgcccatcgtctgggatgtgaggagcccctctgcctggctgcccagtctggaaagtgaggagcatctctgcccggccgccatcctgtctaggaagtgaggaacgtctctgcccggccgcccatcgtctgggatgaagtgagaagcgtctctgcccggctgcccatcgtctgagatgtggggagcgcctctgccccgccgccccgtctgggatgtgaggagtgcctctgcccggccgcgaccccgtctgggaggtgaggagcgtctctgcccggccgccccgtctgagaagtgaagagaccctccgcccggcagccgccccatctgggaagtgaggagcgtctccgcccagcagccaccccgtccgggagggaggtggggggggtcagctccctgcccggccagccgtgccatccaggaggtgaggggcacctctgcccggccgcccctactgggaagtgaggagcccctctgcccggccaccaccccgtctgggaggtgtacccaacagctcattgagaacgggccatgatgacaatggcggttttgtggaatagaaaagggggaaaggtggggaaaagattgagaaatcggatggttgccgtgtctgtgtagaaagaggtagacatgggagacttttcattttgttctgtactaagaaaaattcttctgccttgggatcctgttgatctatgaccttacccccaaccctgtgctctctgaaacatgtgctgtgtccactcagggttaaatggattaagggcggtgcaagatgtgctttgttaaacagatgcttgaaggcagcaggctcgttaagagtcatcaccactccctagtctcaagtacccagggacacaaacactgcggaaggccgcagggtcctctgcctaggaaaaccagagacctttgttcacttgtttatctgctgaccttccctccactattgtcctatgaccctgccaaatccccctctgcgagaaacacccaagaatgatcaataaagaaaaaaaaaaaagaaaaaaaaaaaaaacacttgaccaaaatagaaccacaagttctcataaaataatagtcacttatttagccaaagtgataattaaaagattaaaaaaaaaaaccaccaaaatcttgggctgggtgcagtggttcatgcctgtaatcccagcactttgggaggccaaggcaggtggaccacaaggtcaggagtttgagaccagcctggccaatatggtgaaaccccatctctactaaaaataccacaattagccaggagtggtggtgggtgcctgtaatcccagcactttgggaggccaaggcaggtggaccacaaggtcaggagtttgagaccagcctggccaatatggtgaaaccccatctctactaaaaataccacaattagccaggagtggtggtgggtgcctgtaatcccagctacttgggaggctgaggcaggaaaatcgcttgaacctgggaggtggagattgcaccactgcactccagcgtgggtgacagagtgagactcccgcctcagaaaaaaataaaataaataatcttttattgtttgatacaggagattcagtttttcaatcaaaagacctgaaaaagccagcatgagaaaagtcctattttttctgtttttccttttcaatttattcagaagatgaacaaaaatattttcctgtgtcatattaataatacatacactttttgttcaggattaaatcagcttttacatttttggagcctctgatgttaaatccttgatggcaaaaggagattgatctgactcaaacatggacctctgtggttcctctttctacaataaacatgagtctcaaaaagaggccacaaataggtcaaagtctcctaaaacacaaacttaaaacttttacagtaataataacatcactattgaaacatgcaaacaaccacaaaagatacaagtataagacatttacaggatagcctcaaatatagtatctgaaaatattacagaaggcatggaaattttaattaaaaataaaaattctttattttaaagttataaaaatgtgaaatcttatcattatgaataaatccacagtcagaatggtggcatgaagaccccagggcacagctgctatgtttggaagtttagtcctgtgcctttgaagacctcccaaaacccttgcccaaaattgcagccaagagcgccttccagggagcacataagaacccccacaatcccagatgctagcttggaaacaggaccctgttcctggaaaaagaagctgcctgtagaaacatggggagctgctgaaatcctgacccttacactatttcctctgcctgatctcattgcaggtggccatgttcccctggcagtggcagcagcaggctccaggctgggcaaagggtgggagcaggcaaaagatgtgcgtacagccctcacgatgagtgggtactgttagtggcatttctggggcagagcctggccccatgggaaacttcagcaaactcaagggtctgtgtcctgcataacctgctgtgttcccttgtggctccccccatatcagggaccagcagcagccatgggcctgctggctgaggccccactggctaccccttcactgccttcatttattccagcctcttagagcttcagggctgaagaaagtggatgtggcaaatgctacgtggtacagtatacattatttactctctgctttcttataaaaagtttgccaatacctgttcttgagaagtcattaaaaaaaaaccctctatattcttagagttatatttaataaagtaaatttttaaaaaatgtttcacttgaaataaacttttttgggtaaaggtaaaactgtgtccattactctcagtcatcttggttagaataaaccctgagacaccaagcatccaattattaatgccctggaaatgggaatccacctgctgcctttttttctgtaacaaatatcaaattagttcaactagaatatgtcactcattaaaattagcatcaaactagaccatctgacagagattttttcctgccttaaaatggggtatcttaagctataaaaacatatactttgaatcttggtttgtagacatccctcgtgactatggcagtgtttctgatcaagggagcctccacgggaatgcaaccctaagtggttctttaactctcccacagctggttatttagaatcctcacattttgggtaaataccgtaattttaggctcattgaaatttaaactcttgaatcttttcagtgccagactttgtatctatattttacgaactttagtccttttactctgggcatttacaagcaggcaaattttgtcagagaaaaaacagccatattttagctaaatacacattgtcaacatggcaaacagcaaaaggcttacttttaaggtattttggtgtgacttgcttagtgaatctaataaaatagaagcctatctaagtaatgaattcaggggtagttcaaccagaatttttatatatgtacaaatgtttctggtaaagcaaagatattttagagtaacttacagacatttaagaatattgggcttgagcctgggcgcagtggctcacgcctgtaatcccagcactttgggaggccgaggcggccggatcacctgaggtcgggagttcaagaccagcctggccaacaacatggtgaaactccgtctctagaaaaatacaaaaattagccaggcatggtggtgggtgcctgtaatcccagctactctggaggctgaggcaggagaatcgcttgaacccgggagagggaggttgtggtgagccgagattgtgccattgcactccagcttgggcaataagagcaaaactccatctcaaaaaaaaaaaaaaaagaatattaggtttgtataattttttcttatattgttttatctttagatttttagtggtttgattatgatatgcctaagatgtgctttaatttgtattttccttgtcaggttgttaatcttcttagatcaacataataaggttttaccaattgctaaagttttcagctattagttgttgatgtacttttctatcccatgtaattttttttcttgttttttgtttgtatatttgtttgtttgtttgtgacagaatctccctctgtcacccaggctgcagtgctgtggtgagatcttggctcactgcaacctctgcctcccgggttcaagtgagtctcatacctcagcctcccaagtagctgggattacagaggcccgcgaccacgcccagctaatttttgtatttttagtagagacggggttttgccatattggccaggctggtcctcgaactcctgacctcaggtgatctgcccacctcagcctcccagagtgctgggattacaggcatgagccacctgagatactctgtctcaaaaaaaaaaaaaaaaaaaaaaaaaaaaaaaaaaaagattgcaggccgggcgttggggctcaggcctgtaatcccagcactttgggaggccgaggcaggtggatcacttgaggccaggagttcgagatcagcctagccaacatggtgaaaccctgtctctactaaaaaataataataataataatacaaaaattagctgaatgtggaggtgtgcacctgtaatctcagcaacttgggaggctggtgaaagagaatggcttgtacccgggagggggaggttgcagtgagcctagatcacgccattgcactccagcctgggcaacagagtgagactctgtctcaaaaaaaaaaaaaaattacataccataatcaagtaatattttttcacaaaataagtgttggcttaatatttaataaatattctctaacatattacaaaatattatttgcccccattttctgcatctgctcaccctgttcagaacccaaggtgccatgctgcttctgcatctctaagaagccaggtgcccgaccatgagaactaggaggaagggagttgaaggagccagaataggaggcgtgctgtggaagcaggagtgaccagacctccaggcacaggatacccaggacagaggggacagcagggctgggagctccatgggtcaggcaataacaggtgccagaagttgccaccatttcacacctcaggcaggggcactggggcaaatctgaaggcactcacggactgggtgctccagaaatggacaaagcagtagctccagcttggcattgcatggccattatcatgaccaaacaatggggagaaaaactgactctccaacaaatggttcagaaaactcaatatttaaattaaaaaaaaaaaaaaaaagctctctttctctgaacattatacagaaaaagcctatgtatgcaaagcaggaactagaagtaatatttgcacacccatggttataacagtattataagagccccaatatatatatgactgatgctgccatctgtgtcctcacagtgatgcaatgacagcatcctgtgtacacacacagagctaataccatgaattcactcactgagcccatgacttaatctgaaacctagacaactggtactgaaattctccccgctcagtgaatccatagggaatcacttgactttaatatcttgttgggtttgggtttgcatgcaatagcttaagaagtctttttttttttttttttttctttttgctatttcataggactttttcagaatgtggaaaacaaaaacaaatccagaagactttcccactgtctgctacctttgccccagactatcttaaacttatatgcttatattttattaaacaaaacaggtgctctctacaatctctgtgataattatgaggtatttgaagcaagatataaagagtggtttcatgttttaacttaatcttttttgaggttggaatggttcactttaatgaaagattttttgttttaatgttctctgttgttttaaaatgtgaacttgtgcacacatgtgcagactcaatgttcttgctaaaaacataaactacataattaatataaacaacataatacacataattaataaatatataaacaacataataaataaatactaatataaagattcttatagtcactaggccttctttttttcttttcttttttttctcttttttttttttttgtttttgagacggagtttcgctctgtcgcccaggctggagtgcagtggtgcgaccttggctcactgcaatctccgcctcaagggttgaagcgattctcccgcctcaacctcctgagtagctaggattacaggtgcctgccaccatgcatggctaatttttgtatttttagtagagacggagtttcaccatattggtcaggctggtcttgaactgacctcaggcgatctgcccgcctcggcctcccaaagtactaagattacaggcgtgagccactgcgcctggcctttctttctttctttttttttttttgagatggagttttgctcttgttgcccaggctggagtgcaatggcttgatctcggatcaccgaaacctccacctcctgggttcaagcaattctcctgcctcagcctcctgagtagctgggactacaggcgcccaccaccatgcctggctaattttgtgtttttagtattttgtatattaggggtttctccgtgttggtcaggctggtctcaaactcctgaactcaggtgttcgatacaggcgtgacccaccatgcccagccaccagtccgtgttattgttaagtgtcagtgggcatcagttgctaaagtttgtaatacttgctgagtcagttcaagccatattttgtcatctaatctctcataagctgaccccttatttttggcattattcctgttgattcctagtgttgaccattgacctccacctattcaaacttactgtggccagtggacagaaagacattcagtgctctggacatagagtgtttcactaatcttaccttccataattcagtctatagaagattagaaataaggcttccttccttattcaagagaatgctttcatgtgcactcttgattttctgtcagtaagggcagataagtacacacagtcttcagtcatatatattaaaaaaaaaaaaaaaaaaaactagagggcgggcgcagtggctcacgcctgtaatcgcagaactttgggaggccgaggcgggcggatcacgaggtcaggagatcgagaccatcctgactaacacagtgaaaccccgtctctactaaaaatacaaaaaattagccgggcgtggtggtgggcacctgtagtcccagctactgaggaggctgaggcaggagaatgctgtgaacctgggaggtggagctcgtagtgagccgagatcgcaccactgcactccagcctgggcgacaaagcgagactccatctcaaaaaaaaaaaaaaaaaaaaaaaaggaaaaaattaaaaaaataaggcacccaagaccatacaaaaatgggaattttctaagtctatacgaaatacatttcctataattgctgagcttttatttatttatttatttttgagacgaagtctcgctctgtcgcccaggctgaagtgcaatggtgcggtctcagctcattgcaacctccgtctgccgggttcaagcgattcttctgcctcagcctcctcagtagctgggattacaggcatgcaccactgtgccaggctaatttttgtatttttagtagagatggggtttcaccatgttggccaggatggtctcgatttcttgacctcgtgatctgcctgcctcggcctcccaaagtgctgggattacaagtgtgagccaccgcgccccatctacagtacttttttagagtaaaatttgaaatacataattatctcgagattaacgtagaatttaatagattatctaatagtcctgactaattttagtagttctagctctattcttactgaattttattaccttatagtccctaaataagccaactttaagagaaatatagtaaacttcctagattttgagaaatgtttgagtcattacctgatgcaaataatagacatagacatgaacgagttacaaaagaggaataatatttttgatgtgcataaaaactttttaaaactgaatcttttagtactctctctatgtagatgagtctaggaaacagaataggaactaataaattgcaattttctgcagtggaagatatctgcaatcactagaagcaactgaatcagaaaagctgaaatggcctgcggcaacctcagaaagcaaaaaacaggcttgtgtggacagaatgcatactcactaatagcagaatgacagagagattactttttaatgaatatctgtgacattaattcttttgcatcagaacttgattttcattctaaactttcccactatgcaaacatgtatatacaaacaggcacacacacatcctcacattcttacactcatgcaaattcaaccagattttctgcagccaggatatctttaagtacaccagattaaactagataatttagggattatctgaacccaccagagcaattgcttgtttactttctctgtaaatgtaacatcagtatttcctagatgtcccactgatatcttaattacaactttctgataaactactagtgagaaagaatttgaaacagaccctttttctagacatattttatgactctaaaatttatttctattatagaatatagaagacattaacttatttggcaaaaaagaatcacaagtcacaaacttgcaaaaattaaattaatggtgcagataaagttgtaaaattaaattaatgatgcagataaagttgttaaatatctgaaattactagaattgaattccagaaacccctgacatctaagttaatatatcaaaaaggttaaataatttaaacaatttatattcctggataacaccttgatttctagtgtctttaaattattaaaaacatttcagccaagtatggtggctcacacctgtaatcccggcacttgggggggctgaggtaggtgcatcacctgaggtcgggagttggagaccagcctgaccaacatggagaaaccttgtttctactaaaaatacaaaaaattagccaggcttggtgatgcatgactgtaatcccagctacttgggaggctgaggcaggagaatcacttgaacctgggaggcggagatggtggtgagctgagatcacgccattgcattccagcctgggcaacaagagcaaaactccgtctcaaaaaaaaaaaaaaaagaaaaaaaagataccatttctttgtaagtctggctctgttttcaaagtgaatattgttgtaaatcatttatattcttctcctcaaatgctttacttcccatttttgtcttagggaatctgagcatatcttgaaaaaaaggtctatgggaacaatgaccctaccagaggtttcttatggtttcgcacagttttgtgattaaggaagggaatgatcttagcaaaatggcagaaacattgacaattcaaaactgatactgaaaggcatatttccaggtggaaatgcaagacagaagtagaatgattgagaatgtggaaaacagcacttgcatagaatgctgttttgagctttaagtgtaaagaattcctgctttgaatcattaagggatttttacgttattcatctggtgtaaaacacaacacagataaagagagtcagtaaatggaaggttgtttttattttaccaaaatcttatattattttctaatattaatttacttagttcctgacaactaaataactattttgtgcaatgaatggtatttaatgttgatgggtgcaaagcttaagacaaagaacaaggaacaaaaatttctgcagcttgttactatttacaaagcacaaaattcaaatgcatttttaaatttaatactcaaacaaccttataaaattcttttttttttttttagacggagtctcactctgtcgcccaggctggagtgcagtggcgtgatctccgctcactgcaagctccgcctccctggttcacgctattctcctgtctcagcctccccagtagctgggactacaggcgcccaccaccatgcccagctaattttttttttgtattattaatagaggcaaggtttcaccatgttagccaggatggtctcgatctcctgacctcatgatccacctgcctcagcttcccaaagtgatgggattacaggcgggagccaccatgcccagccataaaattcttaataaactctttattctatttttttttttcacatggagtcttgctctgtcgcccaggctggagtgcagtggcgtgatcttggcaaactgcaatctctgcctcccaggttcaagggattctcctgcctcaaccacctgagtagctgaggttacaggcacgtaccaccacacccagctaatttttgtatttttagtagaaacagggtttcaccatgttggtcagggtgttctcaaactcctgacctcatgatacccctgcctcgacctcccaaagttctgagtctgttactgaactcgatccctggtggactgaagaaaggagggtgaatgtggaaagaaagacaaagacaaaagagtatgtttgaaagaaggggtcgggggcaccttgtctctagtagacaagggcccagattttccacagcccttcgtatttattggtaaaagagatagtgagaagggggatggaagaagaggtcatttgctcagtccagagtaggcctgcaagactgcattccttgaacaataggctctagatgtcccagtagataacctcaaggagcccagtgccagggagtgaccaccctcagcaaaccttctggtggcaggcgcagttgtgagtttgctcacatcctccattcatgacaaacagcttgctgtttgatcatatggcctctagtggaatgctgagttggtcacaatccctttggcctttttggctctcaacctctcccactttgtgtttatgtattaattaaaacaatgtaaggccagggtgggcagctctcattttccaattggcgttccatctgattttacagactgtgaacagaagacagagacaaaacaacattattccaagaactacatacaagatgttagttaacgtggtgctttagatagttccaagggttgaggctctccaggccttgctggaattcagtccagtcttctaaagaaggctgaaactcttgagtttgcctatttaaataagaattttgttttgtaattcaccaatatcaaaggtgatgttggatgtgaaagctccctgcaaatgggctttcacaaggccccatggatactcactttggttatattctaagttggttacacaaacatgagtgtgactaaaatgacaacgcaattgctcctgcaattgtaagctttgtacttgttctcctaaccatagaaccatgaattttaacattgccacttcagtttgaaactcagtgttaattttattctgaagtagccatgcttggtcagctgtgcgcgtccagttctccacatactgagcagtttgaatagaactatgcaaagctacagaggacatcacaacagaagttattagtgtgaccaaggaaacaatagtgaaaattatcatgcctaaggctctatggacatgatgagtaagctgagttagaagaagcttcacaaaatgcaaaggaggtgtgagaatacaaggcttggacagactgacaggaatccatagcccagggatgcgatctaaaatcatcaaagtagagacactgtgtgtttgcaatgtgctatgattaatgcagtgatataattggcaagatttacaggtcagttgggtattgtttacctggagctggtccttcttagctgccaaaaaaacgtgaagattaaaaacacaaactgtagaccaggcacaatggctcacacttgtaatcccagcactttgggaggccgaggcaggtggatcacaaggtcaggagttcaagaccagcctggccaacatagtgaaatccaatctctactaaaaatacaaaaattagctgggtgtggtggcacatgcctgtagtcctggctactcgggaggctgaggtgggagaaccacttgaacccaggaggcagaggttgcagtgagctgaaaccatgccattgcactccagcctgggtgacagagtgagactctgtctcaaaaaaaatgaaaactaacaaaaaaacaaaaaaaaaaactgtaaattgagtggtgatattctttacaaatgcaacattaagactgtgtcatttactattgctattattggataatataccaacccagatgttgccattcataaatgggagtgctgccttccatatcgtctctcgaattggtcctttcctccctagataatgccgctgaggaagagatgggctaaagcctgctccatgccaagcaatctgggtggcagatggattggattccagtgttgtataaagaagaagcattaaaagcttgccatcaatgccagcaaagtttgtgccatgatttccgattttcatcttttccatctaactgaactttaggtccccaatccataatgtctccagttaacatagattgttttctaggcactgggccaagacactgggtccaaggaggggggtaggaactattgaagggaatccattctgtagagcagcacaattaggacaattgggctgggaatggttggttagcacaccagttacattaatagaactaagacttaataaggacatgatttttctatagtgactcaaccatatttgagcttgaattgtaagacacctatggctgagtgacatctttgtggtgatacacatgagaagtccttccagtggagcgatataattaatgacattattctgagagtctaactgttctatgtcagggggagttaggggtcctgaagcccatgctccttgatcatgataaatctcaggaggagtgtcactccaaagtataggttgtactgctggggaattgggaagatatgcacgatatgtttttgcctctgcacatggaaaacataccgcacaggacattatggctaacatggccatgaacatgtaattaggggtttttgtctggttttgatgctccacttgtttctcagcttcctgcatggttttcttgagttgcccccaagttattgggttgatgtcgtcgtgactctagtcagccttctccctgtcttcacactcaggctcagctggctcatggctcataccaaggggcgaagcccatggttggccaccctgggttcctccagtctcccattccatggtctcatgcaccttgagggcatccacacggtttgtccatctcctgtaaaaacacgagtataaccttgtcttctcatcagtaaatccactggatctttccattgtccttcttctggggatttccataaaacttttggataaactttcctcttttcctctaacacttgccaatgtctttctgctggagccttaccatctgtaccagaagtcaaaaaatttaaagtaaataaggctaaatgtagttttgactgaggtggtagttggcctcctataccccctttttgtgttttcaacatgtgttgtaatgtttgatgtgcccactttataatgccttgtcctctaggattataaggaattcttgttttatgggttatagctcaaagctgtaagaaattttgaaaagcatgactagtataagcaggtccattgtcagtttttaattgtttatgtatccccatatgaacaaaggatgacaatgtcactgtacatgaccaattgtctcacctgtttggcatgtatcatgcagcatatgagaataagtgtctatagtcacagaaatatagctaagcttaccaaagtttgctatgtgtgtaacatccatttgccaaatttcatttggagccaaacatcatgggttacagccttctacaggtgtggctccggggacatgctggcaaataggacaggcttgtattatagccctagcttggctgcgagataaatggaacatgtgagtaagggcggaagtattttcgtgcagtagcgcttgctgaaacacagaaccaatcaatttatctgctttatcatttcctaaggataatggtccaggaagttgtgtgtgagaacaaacatgagaaatatgaaaaggagctgcacaagaataaatatcatgttgaaatcttaaaaataaattaagcagttccaggtctagtgtacttttaattgtagcagtttctatgcaactggctacatttacaacataagctgaatcacagaaaatgttgataggatctgaagctgtgagctgtaaaacctgaatgactgcaattaactctgagcattgagctgaaaccccagaggtcattaatggttcagtatgtttaggtccatagacagtggcacagcctttggaacagccatcagtaaaataattctggccacctggaataggcttgtgatgagtaatcacaggaagaatgaaagaatgcattttataaaactgcaaaattttgtctgagggataatgatttttctattattcccacaaagtctgcaaaagcaatttgccatgcaattgacatttcccaagctgtggcctgttgctgggagtctaaaggaacaataattttgtcagggtgatatcccgtaagcatttttgacctatgcctgcccctagtcaccatttgtgtaattaaagaaagataaacttgcaaggtactgatggtttgattaggtagaaagagccattctattactgttacagacttgtctatgaactggcccaaaagtcctactagagagtggggggtaggaagaataaacaaaagcaaaggtttttgcagttgtagctgtgaggcatgtctctgctgtaacatttgctctacaagccataactcagcgtcttgcctctttagttaattgccttggggaatttaaagaagaatctccttgcagggtttggtaaagatgtgtaagttgataggtaccaatacctaacattgggcatagccaattaatatctcctaataattgttgaaaatcatttaaagtctataacctgtctttacaaagaactactttctgaggccatacactcctctctgtaacaatagttcctaagtattggtatggagaagttgttcgtaccttctctggagcaattttgagattccaattaacaagagctcactttacttctctgaataattgatgcaatacttgatctgtaggagtggccaaaagaatatcatccataaaatgaatgatgtaagcagtaggaaacatattccgaggctcctttaatgcctgtcctacaaaatgctgacatagcacaggactgttaagcatgccttggggtaaaactctccattgataatgagaaacaggttctctttgattaatagaaggcacggagaaggcaaatcgaggcttatccttctcgtgtaagtgtatggtaaagaaacaatccttaagatacattaatagcctctggagatggtacacctttctgtaaggtgcccatcggtttaatttttgcattaatagttctcaaatcttacagcagtcgccatcttccggacctttttggaataaggtcctgtatccaattgttcttttactagctgctgatgttgcatcagcttctcctgagataggggccattgatccacccatatgggtttgtcactaagccattctaatggtaaagcagagggtggaggagaaatatcaatgacccccatcagaaatcctgacattctagcccttttctatctgtttttccagttattgatatcgggttagggtttccttgtaggaacctccccaaaccttttcctttctgatatcccatgttcttcaacattttaaatcctgggtcatcaaagttttcatttgtaagtctcatatcccatgctgtaagtctcaaccccataaattgatagctatatttgcaacatagggctgaaaagtacatgactgtccatccagaccaagacaaggtaaaatctcagcactgtgttgaacactttgagctgtttctactcccactagggatgtagaagttaattgcaagggccaggatgggagccatttgtctttagatattactgacacatcagctcctgtatccataagcgcataaaatttatttcctttaatttatactacacaggtgagtctattagaggctagggttggcttagatagatttcccaggtgattgtgcttcccaaaacctttatttcctcatttctcctttcatggagaagggtgtaatttatagggaataagcaataattgagcaatatgttctcctggttcaaaagcccaaagatcttgtgacattaaaactacttgaatttctccttcataatcagagtcaacaactcctgggactacactaatgccctgtaagttaagacggcttttgcctaaaattagtcccatgtatcctgctggtgaaggtctccaaatgccagtgggattcttggtgggtttgtcttccccaactaatgtaaccctttctctggccatgagatctaatcctgcacttcctggtgttcctggggtgagggaatcaatgtgcctccgggaacatcttgtgtgatagaaacctaagctcttagggtatggtctcacagttggcaacataactgattcttttaagggtatgttttggatgatgcgggcaatcacaagaccaagaaatcttacaggctgcagcctattgtgacacttctcttttggaaaataaactctgtcatcagtggcaataatatgtacaaaatcaggacagagaataaagactcagcaaatgcaactaatttgatgcaaggagaagcataatagaggaacatcagtattcaaatgtgtgtcaattctagtgataaaattttttttacaacctctaggaaaaaatggaaagaatattactacaattctaccaggaatttgatgggtctaatcaaggtagctcacctttccaggatttcagcattggtaattattggcagtcttggtgctcatttgcatcagtggccagtatcagtgaaggaaagtccatgagttcttgaactcatggaaaatcttctccctcctaccatgtccacattgtcttccatggacccattaagcaaacattgtgaaaggtatggaaaaagtctaatatccaaagcccagtcatccatttggccatatatatatatacacacatattttttgtttgtttgtttgttttgagatggagtcttgctctgtcaccaggctggagtgcagtggcgccatcttggctcactacaacctccgactccctgattcaagcaattctcctgcctcagcctccaaagtagctaagattacaggcacgcaccaccacgaccagctaaattttgtatttttattagagacagagtctcaacatgttggccaggattgtctctatctcctgaactcatgatccacctgcctcagcctcccaaagtgctgggattacaggcgtgaacaactgcacctggccctattagccctattattggtagcttctcatactcacaaaaagcattcacataggaaacaaatattcccatgttcattccaactggtcaatcatatacctcattgcagactcattattgctgaatcttttgtttatatcaaagtctacagttccagacttatggccattagcaataaatacatgcagatgcctatctctaaatgatgtaaacaaaaactatatgttgttcaaatttctgccatttggaaagctatcttttccccaggtttttttttttttttcagggccaaataactaccagcttaaattatactggaaatagcatattgtacagaatcatctgtggataggtaaattatttcccccattggttacctgttaataagaaacaccaatagggcctcagttgtgggttgaaaggtggcaatgcatggaggtaggtgccatggaggtctgagtcacctctacatgcaacctttttgtgcccatagcacgtgcttcagcttgatggcctatagaccagtgttccttacttgtctacagcaactgtgtataccatgctattttccagtagatctcataacatgcaattcataatggatatttcaggtcttgttacatcatatcccatgatcagttgttcaatctctaaagaagtgcagtggcaagccaagacctatttccaatacatttgtcaaaactagatttttttttacatccctggaattctgtactgtggttgtcagttgggcttgccaactgtcagttctgcagtaggtcacagcaccgtgacctgctgcagatgcttcagctccatcctgtgtcctctactgcagagctgccttccctccagccacaccagctgcagaactgcctcttgctctgggcttcagtaaagataggcagctttctgggtcactctgtacatgtgttgaagcagcattctcaaatgtggcatattttgtctccaaaatataaagagattaacaatggttgtgccccttttgcagaaataggtgatttcagttccatgagcttttcttacatgttgaataggctgtcttgacaatctgcagaccagagcccctagagattgacctggtgcattaatctctgcagtggcaaaccaagcaaattcagttgagctataacagaaattcagatctttagtctaatgtcagagcagcagaagtgatgtgttcttcactctgtctggaatgctcttatctgaaatacagacatggctcttttatttattttgggtcactgttcagattttctgagcctgagactttcatttagaaaatgacacaccactatcactctccaagtcttttactttgctttttgcttttcttatataatcatatgggtgggtggtgtatatatagatatttattgtgtgtatataaatttatatataaatatctatatatacacacacacatatcaatttgctgtggttatttatttacattcttgtcaccccaaaataaaaattctttttacatagaaacctaagtgtattttaattttgttctacctattctgaaatcctcagctcccaaaataacgcatggtacacagtaggagctcaatagacgaaaaaatccagttttgaataaaattatcataatcattacagaaggtgaagaggcagcaggcatacttcacttggccagagcaagaggaagagagtagggggagggaggtgccacacactttccaacaactagatcttgagataactctatcttgagaaccgcaccagaaggagaaattcgcctccatggttcatttacctcctagcaggccccaccttaaacattggggattacaatttggcaagagattttggcagggacacatatccaaaccatattaccatcaaatataaaaggtagaatacatttacttttagatatccaaggtctttaaaaatgtacctaacatgcacactctctggataccaggatgcaaactgtctgtggaatcagcaagcaaaacaagagcagaaccaaacagaaggagactcagagacagggaagccatttgagggagtaaggaggggaggcttaggtcacagctttacactcttcagagagaaaccaaatcagaggaggaagaaggcaggctgcaggagagacatctgcagggaaagaaaaaatgtaacccagagataatttaaagtgctataaacaaatgaaaaacaattttggggcaagtgtaagctaagtggtagtattttagcaaaacttagcaataggcaaaaagaaaatcaaactaatataaagtgaaataactatttaattcaagaaataaatttgtattaaaaaggtaataaaagggcgggtgtgctggctcatgcctataaccccagcactttgggaggctgaggtaggcagatcatttgaggtcaggagtttgagaccagcctgaccaacatcgtgaaaccccatctctactaaaaatacaaaagaattagccaggcgtggtggcccacacccgtaatcccagctacttgggaagccgaggtaggagaattgcttgaacttggcaagcagaggttgcagtgagcccagatcatgcctctgtactctagcctgggtgacaaagtgaaactccgtctcaaaaagaagaaaaagaaaaaaaaaggtaataaaatcatagtatactgcttgggtgtttagtaaataatatttgattaatcaccttacagcattcgctgactacaagtttaggtaaaaataatgttattagtattctgaattgctagaatggtggggaagggcagttaacagaaaagtggtttccaagtatctctcagtattaaagggcagtttttagagtttatatggtttaaggtcaaatagatgaggaaaaaattaactgaaagaaggagaaaaactaaactttacaaaaaaaactcttcatatttattatcttcattaaaataataattttctcaaggataaatctcaagaattagcaaattcagggtcccaaaagtaacagatgctgtggaactggatgctctaaaaccaagtataacaaaatctcaggaaaataagcttctcaacgaaaaacttgattcacatgcaagccaactagaaaaaaagaaaatacagctttttaccatcaactgaaaggactaataaggaggggaacaaagaaaaactactttatatgtctgctagtttatgtacctaaaaagtagagattagggattaatttcatcatattgtttacaaaaatttgtaattcggctgggtgcggtggctcacgtctgcaatcccagtactttgggagaaaaaaatattaaaacttttgttactgcaaacctatgaattttgtacaaatctaaacagtgctaattttaaaagacctgggcttggagtggtggctcatgcctgtaatcccaacactttgggaggccaaggtgggcagatcacctgaggtcaggagttcgagaccagcctggccaacatcatgaaaccccatatctactaaaaatacaaaaattagctggtcatgggggcatatgcctgcaatctcagctacccaggaggctgaggcaggagtattgcttgaacccgggaggcagaggctgtagtgagttgagattgcaccactgcatgccagcctgtgcagcagagcaagactccatctcaaaaaatatatatatataattcatttatcttgattatatctgcttagcataataccaatatttactatataatatatttaggcctatttccacaaatattatttggggtatctcttattataaagtctatgaacacagtagaagacaatgaaaatgtttattcactgagtgttacagtatttcaggtatctttacctagagtattaaacctaatatttctaaaccaaaatccaatctataaaaaatcaacttaaaattttttttagattttgatgaaaatataatcctggaatatattgctaggaacattatgcagatgtagcaaatatttgttgagctgaattaaagtctccaagcctataattttaaatttttcttgatgcaatttcaaaaatttcctaaggctataagaacttagtcatacatacagaaaatattgatttcaataggtaaggtgtggcctcaggcaggcaaagctcaaattatttttgaaaagttttctaattctttttaacatttttatattattttaaatgttctactttttgtaatttgttttttgattccttctttgctacataaatgaaaagtaacacacaaaccatttctgaaatcttcaaaaaagctttggatagaaaatctggagattattctggcttttttagtgtagacatctttgaaagttttcaaattgaagaaatatacaaatagaaatattctattaaataggatacatgatactgtctatagaataattaccttggctttagtttttgtagctaataatttttaagattacttcccctacattttattacttcggctagaaatcttgtttatttaagttattgttagcttagtcaaacttcaaactgtaatattggaattaacagagcattgtcagaattctgcaaaaagtcatctgtatattctcaagtttttatatcatagaaaggcctttgccaggtgtggtggctcatgcctgtaattccagcactttgggaggctgagacgggcagatcatgaggtcaggagatcgagaccatcctggccaacatggtgaaaccccgtttctactaaaaatacaaaaattagctgggcgtggtggcaggtgcttataatcccagctactcaggaggctgaggcaggagaatagcttgaaccatggagtcggaggttgcagtgagcagagattgcgccattgcactccagcctggcgacagagcgagactctgtctcaaaaaaaaaagggggttcaaatccagtacttagagctttctaggtgtttctagccaaattcagattaaattggctaataatgtctttcaaattgttgtaccatgctccaatattgaagtataacttctagaaacaaatgaaaaacaagttgttttcaaattatatgttcttagttacactgtaacacagtatgaagccttgaaaatatctgaagagagaaaatggaatcagcaatgatccagctgtgacctcactacttagtaattgtgcttttagccaacttatttacttatctctgaactgagcacatttctggcaaggtggtactaatcactgatcaaaactaccttaaaaaaaattcagaaatctcagggtatccagagaaaatagagcaggtgctctgaatagtcaccattaacatttcactttgtttcagtatctatttactatcacttaagtacatacaaagaatacaagaaaattgcccatttctcatttttaatgctaaccctaaaacaataaggcttttgcagcttgaaattaacagattctggccaggcagggtggctaacatctgtaatcctagcattttgggagggagtggaaggtggatcacaaggtcaggagttcgaggccagcctggctaatatggtgaaaccccgtctctactaaaaacacaaaaattagctgggcatggtgacatgcacctgttcccagctgctcgggaggctgaggcaggagaattgcttgaacctgggaaatggaggttgcagtgagcagagatcatgcaactgcactccagcctgggcaacagagcgagactgtctcaaaaaaaaaaaaaaaagaaaagaaaagaaaagaaaaggagagaaaaaagaaattaacagcttctcactggtccttcaacagaaggttaaatgatgatggagtcagctgcaatggaaaacactccaaattttccatggtaaacaaatctggcctcagttcttgcagttcccaaattcacagttcttttgggatatgttgatgcatgagctgcaaaagataaaacattccacaccagaagattttgtttataaaaacttattcccatctaataattttaggagatataaacacagcaatgttaatgactacctattaattgttaattcttggagaaaaattgacagttatttctgaaaacatgaaaagcttcatataataattagaaccttacatgtgaaattctatttattatggagaagttaataactaatatgttaccagcaataaaatataaatcatttctcactgtgttaccaatggccagtccgcacaggtttgcagtgattttggtttttgtcttctcaaaagaaagtatctagccaagagacaaaaagcaaatttgaagcaaaagttggactttattgaaagaaagcaaagtagctttggaaagggaccaaatgggtgacttagagatcaagtgccctacctggcccttggctccagtttcttacacattcacttattttctagtattatggactcctcccctggtccctttggcatgattaatgcctcactgttgcttgtgcggtacttgccagcagtagggaagtcgtctgcatgcttcatgagtgttctgaggttctatgcttgctctattggagatattatttttaccagttgagcacctccagagaaaggcatatattggttaaactccactattttgcctctcactgtccatgcttggatggtcttgccaaatttttgagattttattaagttgttgcccaagcactcaaaatgttttctatttgttagaagggtgcccctacttgtcaccagctgagaccacttatcaatcctgaggtgaccacctgataatcacttgacattcctggggcacattcccagggcctctaccttacccaactcatcactatctgactacctgctctaactgggtaattggatattctattgcctgtgaaacttttggtatctaaaacttttaccagtcaatatatacagcccatcaactttcttcactttaattgtaatatgagtttcattttcttttgctgatacagtagttaagattttattttatacttactcatttattaattttgaaagcattataattaaaataaaatttatatggctgccatctaatatgtttgtagatgttagccaaaagtctggcacgggaaaagaaggagaaaaaaaagtagcaggagggagtttttatctttctaaatgattatatgtgcctcctaaaaggtgtttacctataaattataggtggtggcagcagtagcagacaaaggtgtggtatgcagcccttgatcatttcaatgctgctcctgttgagcccatggcaacccagccctgtgtgtagccctcatcctgcactatgtcatcacatcccccctgctggcatgggcacatgagcctcaggcagaccgcaggtgcggggcctgagctggcctctcctgctgttgctactgctgctgcttgagctgctggcctcaggagtgcaggaaacatggggtcactggggaactgagaacagccacactggcatagtcgacaccttttgctggagcatccatagcctgttgtgaaaaggcaatatctgctgctcaaaagatcttgacctggctcaccaagaagtttgtgttgggagtacatatgtttctacagacattgtggagagtctagtaagaggttttggatgttcttggacttgacatctccaacctgtcccagcattgcaacccagcctcagtggccagcagcctagcctaggcccttcttttggtcagtgccagctgcttggcctactgattctagtttctgaccctggacataaccttcaaagcactgcatctggtgttcagcacttcttctggatcgtgtggaccatcctgttctccaggtcctgcaagcacattctgcacaaggataagggtgaggaatgaggtgctccctgtgcttcacagtaaagtccaccttatgacctggcccatgggcttttacaggcatggcagctctactgtaaataagaagctggagcacctgagaacaaggtcagacttttcaacatttgcctcaacagggggctaaaaattctccactgctccaaagaagcgtaaaggttagccaaccataagtgccagtttcttttttcttttttttttttttgagacggagtctcactctgtcacccaggctggagtgcaatggcgcgatcttggccactgctacctccaccttctgggctcaagggattctcctgcctcagcctcctgagtaactgggatgacaggcatatgtcaccacgcccagctaatttttgtatttttagtagaggcagggtttcacgatgctggtcaggttggtctcaaactcctgacttcaagtgaactgcctgccttggcctcccaaagtgccgttacaggcatgagccaccacacctggcccatcagtgccaatttctaccagtgcactgtctcaaaaaaacaaaatggagggaaaagaacaaacaccagaccccaaacaaaaaaaaaatggctgagcaagtaggggcaaatagtaaagatttttttttttttttttgagactgagtctcactctgtcaccaggctggagtgcagtggggcaatctcggctcactgcaacctcagcctccagggttcaagcgattctcctccctgaacctcctgagcagctgggactacaggtgcgcaccaccacacccagctaatttttgtatttttagtagagacggcatttcaccatgttggccaggatgatctccatctcttgacctcgtggtccgccagcctcaccttcccaaagtgctgggattacaggcgtgagccaccgcacccagccgcaaagatatttttatccttttattagttcttgggacagctctttttattcccagaagaataaaaacagcatttgtgtagatctacacatgaagtgtcattagtagaaaagcgtttttaaacaatgtatataaccacatttgtctgtaaagtaagagaaatttgtgagtagagaataaagttaacttttcctagcatttaaatatatttttgaaagggtaattcataaaggcagattaaagcttcttaaaactttacactgaggaaagaatatgctaatttgacattttagaaaagtttaaatgcaggccgggcgcggtggctcatgcctgtaatctcagcactttgggaggctgaggtgggcggatcacgaggtcaagaaatcgagaccatcctggccaacatggtgaaaccccgtctctactaaaaatacaaaaaattagctgggtgtggtggcatgcacctgtagtcccagctgcccaggaggctgaggcaggagaattgcttgaacccgggaggcagaggttgcagtgagccgagatagtgccattgcactccaacctggtaacagagtgagactccatctcaaaaaaaaaaaaaaaaaaaaagtgtaaatgcaagtgtttgtttttgcagcttagggtttgttgggtaagatctgtgcaaattatattgacttagttcgtgaatgttgtcatttctaaatgtggacagttgggctggaggattaaactcaacctcttttgaattctggtggccctctgccaacactccatcattcagatttctaaatgaaacaattatttttagaagacctaagatttttttccctctgtactttgatgtattttaacctcaatattttgaataggaaaaggaatggaagagatgccaaggggtttgatgccaagagctatctgggtaaccgctgaagatcattcaagactcaatttaaagtccaaatgttactgctagccagctaggcctatatacaaaagctatatcctggaaggctttttgttggtttcattttggttttggttaatgcgggacatgagaaggaaaacaaacagtagtggctaatgacattctcaaatctattgctgcttagaaagcattctcacgaacagtaagcagcaacagacaagccttggagaaaatctgaatggttttctttgaaatacttatagtagggttgttaggtgctttttctgaggcctattctgctctcattttaggtggcctctatcagcagagactgagacatacatagtggacagctgtgaggaccctgggcaagggagattcagaaggcatgggtcagggactggtggaaacactagtctgctagaactcattaggaagtgaagcccagcatttgcataatgcagctgtgaaggcgtctggtgatcataaatgtctccatggcccttctcagcccaccaatgtgctccagcagccactcacacagccctgcatgcaggtttgtaggtagtcctgtcagatctgctagaatcaagaccttatagtccaggtctcagtttgaagaaaacagctgtctacccactcttgtgaaaagattctgtgaaatttaactttgcattgcaagtgtttgggaaacaggtgtagatttctttgaggatgcttacaaaactacagttgttttttttgagatgaagcctcactgtcgcccaggctggagtgcaatggcgtgatctcggctcactgcaacctctccctctggggttcaagtgattctcctgcctcagcctcctgagtagctgggattacaggtgcatgccaccacggccagctaatttttgtatttttactaaagataagaaaaatgttctctccacagtaagaatcaatattatttcatcactgatattttccgtctctgacttgaagctaccaactaactccagcagaaatgtttttggcttattatggacaatctgttacacagcaagcaccatcatgcttgttcactatatttatgtatagaaacatcctcataaggccaggcgcagtggctcatgcctgtaatcctagcactttgagaggctgaggtgagcacatcacaaggtcaggagatggagaccatcctggctaacatggtgaaaccttgtctctactaaaaatacaaaacagaaaattagctgggcatggtagtgtgtgcctgtagctactcaggaggctgaggcaggagaattgcttgaacctgggaggcagaggttgcagtgagccgagatcatgccactgcactccagtctgggtgacagagcaagactctgtctcaaaacaaaacagaacaaaaaaacttcagaacttatgaagcctccctagtatttacctgaactaattagctcaataaatttacatatgtcaattatagaaagtgaaatgaacaatagctaaagtaggtttatatagaagtctccaattaaataaacaaaatcgaatatcctaactcaatataacttaaaacactaattgtggaattgcacctaaaaattattttgtgtgcacaactaaatttcataaaaatcattcttataatccccagtgagcttacataatacctcataaactataaaagaaaaaataataaaaaagaaaattatgggtctagcatgagtaccaagcaagtaaaaaaaaagtttgcatggggagattctgaaccataaaccataagatcttacagtaatgaattcaatagaaagcagacagtatagatttcctttcagcatttttgaggtttttagttttctagtaaattagtcaccttattaaaattacttgttttgcttcaatattgattttttcttcctaaaataggtagacactcatacaagaacagttacttactccataattttcttacacctaaggtttatctttagagtaatgtatgtgtatatttaaccctatgtaagtcaaaactaaaactctgtatgtgtttcaggcagagcggccacatagtcaaagaaaaatatataccaatgtttattcatgactcaggaatgtatggactttatttatacttctatataatttttataattaaaatgaccctgtagtcaataacaatttaattgtacattaaaataatgaagtgtagaattggcttgtaatacaaaggataaatgctgaaggtaatagatactttatcctgatgtgactaatacatattatatgcctgtatcaaaacatgttatatattgcataaatatatacacatttggccaggtgcagtggctcatgcctgtggtcccagaactctgggaggccgaggcaggcagatcatgaggtcagaagatcgagaccatcctggccaacatggtgaaactccatctctactaaaaatacaaaaattagcctggtgtgatggtggacgcctgtaatcccagctattcgggaggctgaggcaggagaatcacttgaaccggggaggtgggggttgcagtgagccaagatcatgccactgtactccagcctgggtgacagagcgagactccatctccaaaaaaaaacccaaacaagtagtgggcgcctgtggtcccagctacttgggaggctgaggcaggagaatggagtgaacctgggaggcggagcttgcagtgagccaagatcgcgccactgcactccagcctgggcgagagcaagactctgtctcaaaaaaaaaaaccaaacaaacaaaaaaaattatgaatagcacaaagaataaaataaggtaattaaaatcatactatgtacccacagaaattaagaacagtaagtttaaataagacaaaaaagaatatttaacctatagaaaaatattctttaacttatttgcagttgaaagccactggtgaaatagattaatagaaatgttagtccattatgttaccaaatagtatattgttaccatcttttacatacactcttgagtaaggtgaaataggttaaagttagaagcataataatgcttcattgaatgtacaatggtcttaacacatttttttaaaagttatatttacatgtaatctaaaaatttaaaaatgtacatttaattacataaaattacaataagtaaaatgacttactaatttaaccaattttaactaaaataaaaaacttttgtcactataatgcagaagaatattactctgaaaacctatctcctgcatcactcctttataagttaaccacaaagagcctctccagttacattttcatcacgcatcttttttttttttttttttctttttgagatggagtttgacttttgttgcccaggttggagtgcaatggtatgatttcggctcactgagacctccactttccaggttcaagtgattctcctgcttcagcctttgaagtagctgggattataggtgcctggtaaatttttgtatttttagtaaagacagggtttcaccatgttggtcaggctggtctcaaactcctgacctcaggtgatccaccggcctcagcctcccaaagtgctgggattataggcatgagccaccatgcctggctgcatcttacactttaatatccttactgttccataaaaaatgttttaaataatgcccacctaataaaagaatctctcatatctttggtgcagcaacaattggtcacatgctttcacatgtgaatatagcaggaatgaaaaaagagcataaagttatttgagagtttaattacatcattattcactaatttaaaaatcagtaattttttcaagataaaagtatactttaattgtaattataactgaaaatcttctacttcttttaatgttatatacaaataatttatccaccaagttttattttgtgttgttttctgtacttagcactgatttagtgtaatgtctgaagtgtccgcgccttagatatttctactgtgaattctcagatatttacataaacttaatttcggattaaatttttttcatttttactgcatctgcaaaaacatattttagtatgaaccctgtggtgttttctatgctgtggtttttttaaaaatgtttttccaaactgattacatttgtagggtttttctccaatataaattccctgatgttgaataaactttgtactatcaaccaagcattatagaccctcatgttttataagctgtagtttttcaaaactgtttttacaaatttattacattttccaggggttttttccaatataaattttctgatgttgaacagtatttgagcaactgcttcagggttttctttagtacaaaatgtgtacaataagatctgtgatgcaagtaatggtactacaaccctcttaatatttgtaatgtttgtcttcagaatgaattatcttcttcactttaaaggcttttattttctgaaagatcttttgacactagttgcatctataatggttttattaagtacagactctctgatgttgagtaagatatgagcacatattaatggcttttccacattctttgtgtatatacctttttccaagtaaaaattctttcctgtgcaataaggtacgagcattaattaaaagttttgccacattcttcacacttgtagaagtttactccaatgtaaattatcttacctacaatcaagtgtgacaaccatgtaaagcctttatcacattctttacatttctagaatttctcaccagtataatttattttatgtttgaaaaagtttgaggtgttgtcaaaatcactgtcacatcttcaggtttgtagagtttctctccagtatgaattttgttatgtgtagtaaggtttgaatattggttgaaagctttgccacattctttacatttgtagggttgctctttagtatgaattctcttatgtgtattaaggtgtgaggaatagttaaatgctttgccacattcttcacatttgtagggttgctctccagtatgaattttcttatgttcaataaggtttgaggatcggttaaaagctttgccacatttttcacatttgtagggtttctctccagtatgaataatcttatgtgtagaaagggttgaggacagtttaaaagctttgccacattcttcacatttgtagggtttctctccagtatgaattatcttatgtttagtaagggttgaggaccacttaaaggctttgccacattcttcacatttgtagggtttctcctcagtgtgaattatcttatgtttagtaagagttgagaactggttaaaagctttgccacattcttcacatttgtagggttttcctccagtatgaatttttttatgtgtagtaaggtttgaagattgggtaaaagctttgccacattcttcacatttgtagaatttctctccagtatgaattttcttatgtgtagtaaggtttgaggattgggtaaaagctttgccacattcttcacacttgtagggtttctctccagtatgaatcctcttatgtttggtaaggattgagaaatggttaaaagctttgccacattcttcacatttgtagggtttctctccagtatgagttatcttatgttcagtaagctttgaggaccacttaaaagctttgccacattcttcacatttgtagggtttcttttcaatgtgaattttcttatgtttagtaaggtttgaggaccggctaaaagctttgccacattcttcacatttgtacggtttttctgcagtatgaattctcttatgtgtagtaaggtttgagaactggttaaaggctttgccacatacttcacatttgtagggtttctctccagtatgaattctgttatgtttagtaagggttgagggccagttaaaggctttgccacattcttcacatttgtagggtttctctccagtatgagttaacttatgttcagtaagctttgaggaccacttaaaagctttgccacattcttcacatttgtagggtttcttttcagtatgaattttcttatgtttagtaaggtttgaggaccggctaaaagcttcaccacattctgtacatttatagaatttctctgcagtatggattctcttatgtgtagtaaggtttgagaactggttaaaggctttgccacattcttcacatgtgtagggtttctctccagtatgaattctcttatgtttagtaagagttgagggccagttaaaggctttgccacattcttcacatttgtaaggtttctctccaggatgaattttcttatgttcagtaaggtttgaggattggttaaaagctttggcacattctttacatttgtagaatttctctccagtgcgaattatcttatgggtagtaaggattgaggacttgttaaaagctttgccacattcttcacatttgtagagtttgtatctagtataattttttttatgtgtagtaaggcgtgaggaccaattaaagactttgccacattcttcacatgtgtagggtttctctccagtattaattctcttatgtttagtgatgattgaagggcagttaaaagcttttccacatttttcacatttgcagaaattcactctggtatgaattattttatgttgagctagatgtggaagcatgcaaaatgatttgccacattctttgcatttgaaaagttttttttcagtatggcttatcttatgtctgtttgaatttgaaaatttatgaaaggctttcacacatttatcaaatagaaatattttgctctgggtagctggcaaacattggttaaatccattataacctcctctgtgcaccttacactcatccacacttttatggtctttttttaaatgtacatttttatgttcacagtttttatatcttctcagtgtcgctttttggaaaggatcttttatatgctgctctggccaaaagtcttgggtaaaatgagaacacataactgaaaaaaataaaaataacaaattattccacttgctagactcagagataaatatactttatgtaacatataaaatcacacaagctacataagcaagatgtcatagaaaaataccacaggccctaatttatttatagacatataaatgtaacaaaaacatactgatcaaatcagtgaaaaatttacaaataagtgtgtgcagtgccccaggtgagtccaatgcaaagagccacatagaaggaaaatataaattggttacatttacccaacacagctttttctgctctccaacataacatagtgcctttagaagtaaattgccaactccaattattttgcatatagcggaatacctgagagtggataatttataaagaaaaaaggcttattttgctcacaatttggcagactgtacaagaagtgtgtgtcagcatctgtttctggtgagggtctcaggaagcttactgttatggtagaaggcaaagagtaactggaaatgtcacatggtaatagggaaagtgtgaggtgaaggagccaggttcttttaatgaaccagctctcttttgaattaacagagtgtaaactttcttattaccaagactatggtgccaagtcattcatgaggaattcacctccatgacaaaaatacctttttccagatcccacatccaacactgaagattatactgcagcatgaggtttggaaacatggacatccaaaccatatcacagacaaaggagacttaacagactcatacaaacctttccagtaaaaagcaagacaatatacaatattcttctttgcatcttgtgtattctgctaggataaataccaagtcttattaaatttaagaataccagctgggtgcagtcgcttatgcttataatcctaaaattttggaaacaaaagtaggaggatcacttggggccacaagtttgagaccagccagggcaacatagtgagactctgtctctacaaataataataaaaaattagccagggatggtagtgcatgtctgtacacccagctacttaaggggctaaggttgacttgagcccaggaggttgaggctgcagtgagccaaaatcatgtcactgcactccagcctgggcaagagtaagatcctgtctcaaaacaacaacaacaacgacgacgacaaataaatttaagaagaccaaaattatacactgtgtttttcgaccaaaattgcataaaactaggaattaaaagcaaaactggcaaatccaaaaatatatcaaaataaaacacactcttcaacatattcttgctcaaggaccgaagaatttaacttttccaaagttgtcaatacaagctacagtggtgaactaattcaatataatctctacataaaattcaatggtacaatttttcacagaaatattcttcacaattttaaaatttgattaaaaactatagccaagccaggcatggtggctcacacttgtaatcctagcactttgggaggccaaggcaggtggatttcctgctgagctcaggagttcgagaccagcctgggcaacatggtgaaaccctgtctctactaaaatacaaaaaattagctgggcatggctatatgtgcctgtaatcccagctacttgggaggctgaggcaggagaattgctagaacccaagaggcagagctttcagtgagccaagatcatgccactgcactccagcctgggcaacagagcgagactctgtctctaaaaaaaaaaacaaaaaaaaaaaactatagccaagcaactatgaaaacaataaagaggcattatactttctgatttcaaaacatattaaaagctacaataacaatgtggtactgacacaaagacagataagtagatgaaagaacagaataaagagtcctaaaatgaacccttctgtgtatgatcaaatgaacttctacaaagttgccatgaggaagcaatagaaaaaaatctcttcaaaaaatgatgctgaaacgtggataccaacactaataaaataaagttggataattttcttgaattatatatacaaatattttaaataaaacacatagaaaaaaggaactaacaaatcttttaaaaagaaatatggaaaaaagacatgacattggtcttggcaccattttcttagacacaaccttaaatgcatgaacagcaaagaaaagaacagaaaaatttaactacactatacctcgaaattactgtacatcaaagaaaacattcaatagagagacaatgcctcctagaaaatgagtgaaagtatttgtaaatcacatgtgatattccttaatattcataatatacaaacaactttttttttctttttttttgagacggagtctcactctgtcacccatgctggagtgcagcggggcgttctcagctcactgcacactccatctcccgggttcacaccattctcctgtctcggcctcccgagtagctgggattacaggcgcgcaccaccacgcccggctaattttttatatttttagtagagacagggtttaaccatggtctcgatctcctgacctcgtgatccgcccgcctcagcctcccaaagtgctgggattataggcgtaagccactgctcctggcctataaacaactcttaaaactaacaataaagttgaataatctgatttggaaatggacaaataattgaactaaatttttaccaaaaatatacacaaatgggaagaagcatttaaaaagacacaaaattacaatttgtagagaaatgcataaaaatcacaatgaaaaacaaaatcacctatcacccatttagaatggctactataaattttttaaaaatacaaaatctgttgatgatgcaataaaaataaaaccatccaggtaggtacagtggctcacatctttaaacccagtgctttgggaggctgagacaggtgaatcaccataggtcagaagttcgagatcagcccggccaacatggcaaaaccccatctctactaaaaacacaaaaattagccgggcatagtggtgggtgcctgtaatctcggctaccctgaggctgaggcaggagaattgtttgaacctgggacatgagaacaaatcactgcacttcagtctgggtgacagagtgtgactccatctcaaaaaaaaataataataaaaaattacaaattaaaaaaaaaaacctatgttgactgttgatggaaaacaaggaggccgaggtgggcagatcgcctgaggtcataagttcgagaccagcctgatcaacatggaataactccatctctactaaaaatacaaaattaaccaggcatggtggcacatgcctgtaatcccagctactcaggaagctgaggcagaagactcacttgaacccagtggggcagaggttgcagtgaactgagagcacgccattggactccagcctaggcgacaagagtgaaactctgtctccaaaaaaaaaaaaaaattataaatgtttctcagatacttaaaaatgaaatcatcaaatacaaaaatctcatttatgaatctatattcataacagaaaatgcaggacctgaatgacatatgaacatccatattttttgtatcagtatgcacaaaagccaaaaggctgaagaaacttagatgtcccttgatttataaatacatcaaaaaattaatatagatctacaatgtaatattattcagccttcaaatagaaaatcttgcctcattttaagataaattttgagaatattatgtcacctgaaattagcaagtaatgaaattatggataccatatgactcaacttatttgagatatcttaagtagtcacactcataaaatcagcaagtaaaacgctgtttgtcaagcgctgaaaagagggcaaaatgagcacttgttacttaatgtgtatttagtttcacaggtgtaaaatttctagaagttttttgaataacaatgtaaatatttttatcatgagtgaaaagtacttttttttttttaagacaggttctcactttgtcacccaagcttaagtacagtggcacaattatggctcactgtagactctaacttcaaagctcatgtaatccctccccctcaatctcccaaaaagcttgtaccatgggtgcataccaccatgcctggctattttcaaaaattatttgtagagagggaatctccatatattgcccagactagtctcaaactttggcctgaagcaatccacctgtcttggcctcccaaaatcctgggattacagatgtgagtcaccatcatgcctgaaatgtacacttcaatagatttaagatggtaaatttcatgttacatgtttttacaacactaacattaaaaaaaaacaaaaaaatacagcattataaactttttaaaaaattaccctcaaattacaaaagtgtttctctcatacaaagaaaatatacattcatcattaaacacatggtgaaaatagactatttccatgactactaacttagagaagacaaaacaaccattaaaaattagctaaaaaataatatatacaagataagctttaaccaaaattggggtcatatatttataaacacacacacacatatataatatgattgtgatagacatttggtgattgatctctttttttttttttttctgagatggagtcttgctctgtcgcccaggctggagtgcaacggcacgatctggctcactgcaatctccacttcccgggtttgagcgattctcctgcttcagcctcctgagtagctgggactacaggtgcgtaccactatgcccggctaattttttgtatttttagtagagacggggtttcaccgtgttagccaggatggtctcatctcctgaccttgtgatccatctgcctcagcctctcaaagtgctgggattgcaggcgtgagccaccgtgcccggccaattaaagcccaatatgggatttaattatctcttaattaaagcatacagaattgaaaattgtctgaaattataatacataggtaaaaccaaaaaacacaataaactgatgttaagaaacctacactgaagaaatacactaatatgaaactggaaaacaataataagagaaatgtttactcataaaatctggtatgcaaggccaggcacagtggctcatgcctgtaatcccagcactttgggaggccgaggcaggcggatcacctgaggtcagaaattcaagaccagcctgaccaatatgatgaaaccctgtctctactaaaaatacaaaaattagctgggcatgatggcaaatgcctataatcccagctactcaggaggctgagacaggagaatcgctggaacctggaggggcggaggttgcagtgagccgagatcatgccattgcactccagcctgggcaacgagagcaaaactccatttcaaaaaaaaaaaaaatctggtatgcaacattgatgcaccattaaagaagaatttgtttagataactacaatatttgtaactttgtacttctgcatcattggcatgaactgtacagcagtaaaattttagagaaaatgcagtataatcataaatacaagattgtaatgagaaacttttaataaacatttaaaagaaactatagataatttttatattttaagtagatgctatacttacaaaaaatgaaactgctgtaatccaactttagaggcaaagaatagccttacaactaaattacatatatatatatatatatatattttgcagaatacggttacagcctctgatatataaaacaaatatttgggaataaattatattatttataattagggtacaaaagtaggtacaaatcctatcattctcttttacctacagcaaacttaaatttataactatattagtaaatatggagtgcttactgattatctaatttacttcagacataatatgtaaattctagtataattgtcctaaatgtctgaatccaaaattacagacaaatttggaaataaaaaatagaaactgggtcaggcatggtggctcatgcctgtaatcccagcactttgagaggctgagatgggtggatcatttgaggtcagaagttatagaccaacctgactaacatggtgaaatcccatctctacttaaaatacaaaaaaattagccaggtgtgatgggggacacctgtaacctcaggtacttgggaggctgaggcagcagaatcagttgaaactgggaagtggaggttgcaatgagctgagactgtgccattgcactccagcctgggcaacagagcgagactctgacgcaaaaaaaaaaaagaaaagaaaagaaaaactaaaaactaaaaatgtatagggagagtgacaacagtaagatggaaaaataaaaggtgccctacttgcttatccccacagagcaagaacgtttctcagccatcctagacaaaaatgcctttatgagagccaggaggcatcatggctcacacttgcaatgacagctacacggtacattgaggtaggagaattgcttcaggtcaggaatttaagatcaggctgggttatgtagcaagaccccatctgaaaaataagttcctttaaaagagctttgagatccaggcaggcagttgtaaaactcacataaagcccaagattaaggagttttctttttcagaaggcaggctctcattcaggtggcaaactacgggacccctgttcttaactacagaccagaaaatggcccacccaacttggtcccacagaaaattctgaacttactctgtaagcatcccaaactgcttccagccacagtttgggagaggtcctgttcttcaaaaggcctggaggaagatactggtttatagtgatgcaggcctttactgtggaccctgaagcagttcaatgactgttccagctccctgagccatggtttatggccagttctgcctaactagaaacccacacagttacctggggaaatcctctctggtactcagtgaaaaccgcactcatccacaacctgatataaagcccaccatatgcagacccgactgcaaaaaactgccctagtgttctgccctacagaggaaagtccaaaaataaaatggaaattacaactacccaagccccttgtaacaagccaactaaaggcggaccctagtgcagactcagcagccttgtgaccaagcaacgacccctcttcactacaggccaggggtggtggctcatgcctgtaatcccagcaatttggaaggccgaggcagacagatcacctgaggtcaggagtctgagaccaacctggccaaacatggcgaaaccctgtctctactaaaaatacaaaaattagccaggcatggtggcatgggcctgtaatcccatctactcgggaggctgagagagaaggcagaggttgcagtgagccgagattgtgccactgtactccagcctgggtgacagagcaagcctctgtctttaaaaaaaaaaaaaaagccacggtatccaaagtgatctataaatttaataaactttctatcaaaattccagtgggatttttttcacagtaatggacaatgcaattctaaaatatacatgaaactagaataaactttgaacaaagcaatcttgaggaaaaagaacaaagcaaagaaacatcataattcataatttcatattatttaaaggctacagtaataaaaacaggatgaactgtgcagaaaatatacaaagaaatccaatggaacagaaagcactactcacacatttcagacatgatgtaaagaaagaacttaaaaaatagtttaatatacagtttctcaaaagtatgcagatatttgtgtgtcccccaaaagaatggaaaagcagtcagattgttcagtctcttaaatgtcatgaagaggactttggctgtcatggtaaacttgaaggaagatcaccgaagggaaataagaatcctgagagaatgtaaaagcataagacagaagatacccttgtgtgaaagcaaaatgaaaaaactcaggctttccagaaactctttcctttggaacacagcttcccaagtcacattttaaggactggctttccccttaacctttggacttctcatctgtgtttgttgtattcactttcactctcacctacctgggggtttggctaccatttcatgtctcctcataggctcccaaggctctttttcttgctccagacaggtgatcaggtctggcttagagacagcaatacctgtttcaataaaaaataaattacgtgaatcttgctcatattctcccattattaacctagtaatgtgtccagtatgaagggtgtgatagaatatcctaatcattaatcccaaaatactaatttttttttttttggagatggagtctcaatctgtcaccaaggctggagtacagtggtgcgatcttggccccctgcaatctccacctccgggattcaagcaattccaatgcctcagtctcccaagtagttgggattacaagcgtgtgccaccatgcctgattaatttttgtatttttagtagagacagggttttgccatgttggtcaggctggtctcaaactcctgaccgggtgatccgcctgccttggcatcccaaagtgctgggattacaggcatgagccaccgtacctggccccaaaatactaatttttaacaaaaatttcttcttgtttgagacagagtctcactctgttgcccagtctggagtgcagtggcacgatctcggctcactgcaacctccacctcctgggttcaagccattctcctgcctcaggctcctgagtagctgggattactggcatgaaacaccacacctggctaatttttgcatttttagtagagatgcggttttgccatgttggtcaggctggtctcaaactcctgacctcaggtatctgcctgcctcggcctcccagagtaccgggattacaggagtaagccaccatgcctggcctttaacaaaaatttgtaaatatttagaaagtatcttattttgtaggttcttaatttcactacctggtaatactgaatcaaaaattaatgttggcaattagattttaagttgtgggcaacagtattttatgccacttaatttctggaattactactaatctggagtgaaagatcagctcagaaatgtggaaagttcaggtcaagatgaaacatcttgaaaaaaattctttagtgcgccaacaaatcccaatttttttgaaaacaggaatctgaaactcatgaatgcaaagtataaattaccaaaaaaacagtctacagaaaacaaaaatgaaatctttagggtatattaggaattgagtattgaagttatgctcacccaggaagaccaggtttctgtagttctctaacatcacattcctatataaattctgctgtgcaatgtccaggcattgccactcctccagacagaattctatggccacatccataaatgtcaatggtccctaaaaaaaacaacacatacacacacaaacacacacatttaccaagtggccacaggcagaatttataatttgactcaaggtaaaatgagagagtaaagagaacaggtactgacttatagaagagactgaaattatccaataaaataattcttttcatggaattattctccaatgtattttctacccctgagaaaagaaagtgatgtaagatccacaacatcagtgtatatataatacttttctggatgataaactgtaaaattaagggcatgaacacaaaagtaaatttttgagttctctatttgcatcatacagaatcagttgcgaatatttttcagataaagacatgttgagttagaagggacctttaaaatattaaggtgtacaataaactgaggatcctgttaatgaagattattttttcagaagatctggaataaagtctgagtttctaagtttctaacaagcttaccagtaatgccaatgattttggcccagaaagactattttgtcaaacatccagtaaatggaaaagtctgtgttttttttctagtttttctggcaagtaaacaaagataagagctttcattttcaaaagacagataaatgcaaagaaaacctaagaaagaagagcagctgccagattaaatgtgatggtttacgtacatcagttgcataaagattcttaataatatggccgggcatggtggctcacacctgtaatcctagcactttgggaggctgaggcaggtggatcacctgaggtcaggagtttgagaccagcctggccaacgtggagaaaacccatctctactaaaaatacaaaaattagccaagcgtggtagcacatgcctgtagtcccagttactcaaggggctgaggcaagagaatcgcttgaacccgagaggtggaggttgcagtgagctgagatcacatcattgcattccagcctgggtcaaagagcaagactccatctcaaaataataataataataatatatatatataatatatacatatatattaatatattttatatatatacacacacatatacatttaaaaaaaagacaaatggctgggcatggtggatcacacctataatcccagcactttgggaggtcaaggtgggtggatcacgagattaggagttcgagacaagcctggccaagatggtgaaaccccgtctgtactaaaaatacaaaaattagctgggtgcggtggcgggtgcctgtaatcccagctactcaggtggttgaggcaggagatttgcttgaacccaggaggcagaggttgcagtgagccaagatggcaccactgcactatagcctgggtgacagagaaagactctgtctcaaaaaaaaaaagaaagaaaaaaggaaaataattatttagggaaagagtctgtcagagagcccttgataatcaagtgaataattaacataaaatgtactagaacaaattttaagatgtgctgatgcacgcaaaaagacacagcatcactgctgtgatattgcccccaaaaagtaaattataatctaaatttaaccataaagaaatatcagttttatgcaaagttcaagatacagatgtctcccatgttctgtaattttttttttttttttttttttgaggtgaagtttctcttgttgcccaggctgaagtgcaatggtgcgatctcggctcactgtaacctctgcctcccaggttcaagcaattctcctgcctcagcctcctgagtagctaggattacaggcatgtgccaccacacctgactaattttcttgtgtttttagtagagatgggtttcattatgttggtcaggctggtctcaaactcctgaactccagtgatccacccacctcggcctctcaaagtggtgggattacaggcatgagccaccacacccggctgtaattttttttttttttttttttttttaagatggagtctcgctcagtcgcccaggctagagtgcggtggcgcgaatctccgctcactgcaagctcctcctcctgggttcatgtcattctcccgcctcagcctccagagtagctgggactacaggagcccagcactacgccctgctattttttttgtattttttttcgtagagacggggtttcaccgtgttaccgcgcctggccaaccaggctgtaatttttaatagtaatttttagtagtctatctttagcacccataaagcaagtatatcctgatagtatttttcagaactttctgctttataaatgtcttcttgtttaaacaagcattttctgaatcctattctgcatagagctaataaaaaacagactgaaactcaacattacatgttctccatttttagtaaggaccccagttttccccaatagaaatcttgagtatccacaccttcccatgttcaacaaccatgaaaggatcatttttaatattgcagttcataaagtcatggtgagaattctgcatggcatattagaagccatgatgtagagaatgtagagaaggctctgttatatagaaaagaaatattttgcagagacccttgcctatcataaaaatttaaaaagcagttaaaacaaactcattagggaggaaaaacacaagtagcaaagtacaggtttacaagtactaaacacatggcattccaggaagcagagtggacacagctcttgatctgagacatgtttagctgaaaaaaagccatttttttctctgtctctgggaatcctttccagatgagattctctggacaaattacacctgcatcttgagaatatgcctttaaagctgtcagcaccacctatttgcctactaccaccacacccacaggcagaaggaccaagacctgcagaaaaagttcacctatttttgtcctttataaccgaagagattcagcaagaatgaactgctccacggagatgctaatatgagtttcaccttttctatcctcaggtgccctcctctgccatggacaccagcaatttttgctacagtaatggaaatatgggccacactgtcctgtccctaccaaacccaaacagaacaggccctgtaaccaccctttagtgcaaagtaaaacttaactcttgtgtatgtatcttgaaccttttatacttgattctagcctcattttggagtcacatgaggcacttaattaaaacaacatggatgcttccacgcagaatctgaaccaaattataaacagaacaataagcaggcctgacctaaataaggcctccaaaaggggtgaatctgaacagaaaaaaagcagagagatgaacctatgtagaattctgttccgtggccgggcgcggtggctcacgcctgtaatcccagcactttgggaggccgaggcgggtggatcacaaggtcaggagatcgagaccatcctggctaacacagtgaaaccctgtctctactaaaaatacaaaaaattagccgggcacggtggcgggcacctgtagtcccagctactggggaggctgaggggggagaatgacgtgaacccaggaggcggagcttacagtgagccgagatcgcgccactgcactccagcctgggtgacagagcaagactccgtctcagaaaaaaaaaaaataaagaattgtgttccctatgccactgggttatttcctgttcggtttttcctaagcttacctaagacaaaattaaattccagagtttgtgtaattttaatcttttttagccgctgccctgtcaatttcataacatataccaataagcaatttaaacaaatcccttaaggttttctaggagaatttattattgtaagataaatatgtattcttagcaaggtaagatgaatagaaacagtactattttttcaataaacattccttcaagtgatgatatcagaagtcagaacaatacaaagaaagtggacaaataaagccaaagttttttttgcacacatctactcattgtaccaacaatataatgctaaattcaaccatgtatccagttgctagcctagactaaaaattcctggatgatagggatgactgcttcatctatttttttaatggccataagaaatggtagaaattagtttatctgtttgagtctccagatctcctgtttttcacccaactacaagaaaactgcaaaaactctcatctgggtaccatcttacacaagatgagaaacaagaacagcatgactaatttatcctagactgagacagagcagaattaaccattcttgtcagcatgacacaattctgttctggacattttcaaatgtcgcaaagatgtctagttgattgtgagaggattccagtgacccagagctgactgcccaatgataagccgggcaagaaagaatcaggcctttttttttttttttttttttttcgtgagatggagtttcgctcttgttgcccaggctggagtgcaatggcacaatctcagctcactgcaacctccaagcgattctcctgcctcagcctcccaagtagctgggattacaggcatgtgcaaccacacctggctaattttttttgtatttagtagagatggggttacaccatgttggtcaggctgatctcaaacttctaacctcaggtgatccatccatctcggcctcccaaagtgctgagattacaggtgtgagccaccacatccagcctcaggctgattctaaatagaaaatagaactgcctggccaggcgcagtggctcacgaatgtaatcccagcatttggggaggctgaggtgggtggatcacgaggtcagatcaagaccatcctggctaacacggtgaaaccctgtctctactaaaaacacaaaacaaaaaaaaattagccgggcgtggtgatgggtgcctgtagtcccagctactctggaggctgagggagaatgacatgaacccgggaggcggagcttgcagtgcaccaagatcgtgccactgcgctccagcccagggcgacagtgagactctgtctcaaaaaaagaaaatagaactgccctggtagagctccagaacctgcatcacctgtcctgattagctagctcttaggtaagaaaaaaagacaaaaataccctactccagtatcgtattttatgggtaggtatagctgtggtcatagctctggacattttgtggtcttgatctctcactcctaagatgcttgtttacacttacagattctgccattagattctatttacacctggagcctctcacgtaagtgttagcaggtcactgagcaaaatctgaaaagttcaaaaagccacactctcaaaggggtctttaaggtgtctatgttgatttctcacaatgcagaaaatgtctcttgctaattttctgtacattctcaatccaaaacctggccctgtcttgtgaatcccaggcagaggccaaactatatgtacagattctatgttggatcaacctggctctgcattcttgggtgttaaagcaagcagggtacaatcaaaagagatcccctcatagaggctgctgtagcacatttaaaataatatgtttacctaaaaaaaaaaaaaaaaaaagaaaaaagaaagaaaaaagaaatctgaggcaacatgaatataagtaaatcatttatttgggccaagcttgaggattataacctgggagcaatgattcaagttgtctggaatgtaaactttagcagcagttacaagtagatttgtaaaggcaaaaaagaggggcagagagtggactggtacaaagttgtttgtcagccacttaggctgggcacggtggctcatgcctgtaatcctagaactctgggaggccaaggcagctggatcacctgaggacaggagtttgagaccagcctggccaacacagtaaaaccctgtttctactaatacaaaaaattagccgggcatgttggcatatgcttgtaatcccagctactcgggaggctaaggcaggagaactgcttgaacttgggaagtgggggttgcagtgagcctagattgcaccattgtactccagcctgggcaacaagagtgaaactgtctcaaaaatcaaacaacccaaccaaccaaaaaaaaaagttgtcaggaagtcttatttatttacagaaataacactgattattgattggatatacattgttaaggtttaaggtatgggttatagtgtccagtgtgacattattagtttagtttatagctacttgtggcaatagcaaatagtttcaagagataaatacatagttcaaagggaggagaaagaaataattgtgttctcattttaatgtctctgagtttgaaaaaaggacttgcatttctcagattaaagtttttttttatttctcaaatctcaaaacccagaatcagaatttggggctgcagatttagtggagctaaatctggtggtgtggcagcaggtttcacctacacagtttagggcatttttagcaagaggaagaaagtggagatcctcatgtcctcatgtctactcaatgcacacgttactttgatcgggtttctgggccccatggtctgtgaatcactttcaggtctgaggatacaagagtcattgaaaaaggtaaaatagcctgggtcagtggctcacgcctgtaatcccagcactgtgggaggccaaggcaggtggatcaggaggtcaagagatcaagaccaatccagccaatatggtgaaacttcgtctactaaaaatacaaaaattagctgggcatggtggaactcacctgtagtcccagctacttgggaggctgaggcagaagaatcgcttaaacccgagaggcagaggttgcagtaggccgagatggtgccactgcactccagcctgggcaacagagcaagactccatctcaaaaaaataaaaaataataaatgaagaggtaaatggttggttccttctctgtgaagtttgtagaaattttgtctatcctttctagaagcgactacagttaattacatataccaaataggcaaaaaaacaattccacctgcatatttaggggacatcatacactttgcagcacaattgtgaatagatgggaagcctgaaagaaaaagtttcctctagattaaaggttagttggcaccttatgtgtttatattatgtctggtaattcaagacagtgtttggaaatggaatttaaaaaaaatttctgcagccccagagaaactccaaaatgatagaacagaaataaaattgtttattacacaattaaaccagaatgtgagcagcatgacagtaaatctgcttaagagattgcaaagacagaaagagagttcagcaggctcactaagcctgagcagtgattcaggctcagtttctacttacaatggtgacatggaaaaaatactgctgggtttggctgagtgcagtggctcacacctgtaatcccagcactttgggaaggaggcaggcagatcaccaggtcaagagatcgagaccatcctggccaacatggtgaaaccccatctatactaaaaataggtaaattagctgggtgtggtggtgcatacctgtactccaagctactaaggaggctgaggcaggggaatcacttgaaaccaggaggcggaggttgcagtgagccgagatcgcgccactgcactccagcctggcgacagagtgagactctttgtctccaaaaaaaaaaaactgttgggttttcagcatgagttcagatgatgataactccgagagttttcatcgtgcattcacaggcaccatgggacactaacagagcttctgaaacagacacccaaagcattagaaagaaaaacagctctccatttgagtaacactgtattgagaaaaaaaaaaagaagttcaaagcatcttaagaaaaaacttagattagatgaaagattgatcaagtcaaccaaaaatactccccttaaacaaatttctctctaaacgaagtgcacagctactctcagcacaagaaacatgagcattatgaaaaaaatatatattctcagcagaattttctaaggtttctcttccatgtctgctgctgtctcatctcctagccattggatgggagttccatattggaatacatctcacaatttccacatgcaccttttgatgaagaattgaaatcttgagtttattcatatagtgtaatatattcaagcttgcaacactgctaactgaagagctactatgtggtttttttttttttgaaatgaagtttccctcttgttgcccaggctggagttcaatggtgcgatcttggctcactgcaacctccgcctcccaggtttaagtgattctcctgcctcagcctcccaagtagctgggattacaggcatgcaccaccatacctggctaatttttctatttttggcagagacagggtttctccatgttggtcaagcaggtcttgaattcccaacctcaagtgatccacccaccttggcctcccaaagtgctgggattacaggtgtgagctactgcgcctggccattttttttttttttttgagatggagttgagcttttgtttcccaggctggagtgcaatggcacaatctcggctcactgcaacctccgcctcccaggttcaagcaattctcctgtctcagcctcccaagtagctaggattacaggcatgcaccacaatgtatggctaattttgtatttttagtaaagttggagtttctccatgttggtcagactggccttgaaatcccaacctcaggtgatccacccgcctcagccttccaaagtgctgggattacaggcgtaaggcaccgtacccagcctctgaagagctactatattttttgagtggccacctgacctgtttttatctgtcctgtaatagcagcattccaatttagttaaatgaaagacactaaaattaagcttccctgtaattatccatattggataaattaataagcatgtcagactaatatctattgtaacaatttggtagtgacttttctttggatattagatataaatatctaagtataaccaactttaatgtactagtcataatgtatgtagtattctaaaaaattgtttgtaaccatatttcagttaaaactactttatatttcaaagtatgagtaagaatattaaaataactatttaggctaggcatggtgattcatgcctgtaatcccagcactttgggaggccaaggcgggcataccacaaggtcaggagattgagaccatcctggctaacacggtgaaaccccatctctcataaaaatacaaaaaattaggccaggcgcggtggctcatgcctgtaatcccaatactttgggaagctgaggcgggtggatcacctgaggtcaggagttcgagaccagcctgaccaacatggagaaaccctgtctctactctaaaagtacaaaatttagccaggcatggtggcacatgcctgtaaccccagctactcaggaggctgaggcaggagaatcacttgaacccagtaggcggaggttgcagtaagctgagatcatgccattgtactccagcctgggcaacaggagtgaaactccgtctcaaaaaaagtaaatttaaggaaaaaaaaaaaatacagccggacgcggtggctcacgcctgtaatcccagcactttgggaggccgcagcgagcagatcacgaggtcaggagatcgagaccatcctggctaacacggtgaaaccccgtctctactaaaaatacaaaaaaatagccgggtgccctggcgggcgcctatactcccagctacttgggaggctgagccaggagaatggcgtgaaccagggaggcggagatcgcagtgagccaaaatggcgccactgcactccagcctgggcgaaagagagagactctgtctcaaaaaaaaaaaaaaaaaaaaaaaaaaaaaaaaattagccggacgtggtggcacgtgcctgtagtcccagctactccagctactcaggaggctaaggcaggagaatcgcttgaacccatgaggcagaggtcacagtgaaccgagatcgtgccactgcactcgagcctgggtgacagagtgagactccatcacaaaggaaaaaaaaacaaaaaacaccacacacaaaaaaaactacacagactccaaggttgagtttacacactgaactgttcttgcttttgcagtgtaagtacttcagcctgcaaatattagattaccttggattatcagttttctgtcaaagaaatttattcagtattttttagtttttaccattctgtatttctaaatttaattcgttcttcgtactaaacttctgtgtgctcttaaaatgagctttaatctaaacaaatctgtgtctactttaaaagactaaaaaaaaaattaaattttcccaaatcaaggataagcaatgaatctgaggtcttaaataaagacaatcttgagtcaaaagaatgccaaaagatttggctgttaatatgatttaaatatatttcaaaaaagcaataaaaatatctccatataatctaaatgctttaagataaaagagttgaacaagatagtctctcttattttcaggtaggataataaagcctctgatttatattttcttttacaacagccaggtctctggacatattgaactcttgaacatctgaatttcagtagacattggattcattgagctccgtctcaaaaaacaaaaaaacacaaaacctgacatcataaaagaacaagagaagaaaaagcaaactgacctctaagctaacagaggacaagaaatgaaaatcagatctgaactggagagttagacaaaaaaatgataaaaatatggagaaggctgggtgcagtggctcacccctgtaatcgcagcattttgggaggccgaggtgggcagatcacttgaggtctggagttcgagaccagcctggcaaaatagtgaaacccggtctctactaaaaatacaaaaattggccatgtgtattggtgggcacctgtaatcccagctactcaggaggctgaggcaggagaattgcttgaaccagggaggcggaggttgcagtgaggcggaggttgcagtgaggcaaggttgtgccactgcactccagcctgggcaatagagagagattctgtttcaaaaacaaaatgaaaaaaaaaaacaaaacaaaaaacaaacaaacaaacaaaaaaagaaatccaggagtaaaatctttgaaagaattaataagataaatagcactctagagagattaatgaagaaagagaagatccaaataaacacgattagaaatgacaaaatggccattaacactgacccaacaacaacaaaataattattcaagtctgtaacgaacacctctatgtaaacaaaccggaaaatctagaatagatcaattcctagacacgtacatcctccaaagactgaaaaaaaaaaaaaaagtatccctgaagagaccaacaagattcaaaattgaagtataataaatagcctagaaaccaataaaaaaccagaatcagacatattcacaaaagaattctaccagatgtacaaaaaaaaaaaagctgataccattcttactagagccattccaaaaaattgagaaggaactcttccccaactcattacataatagcattattctgataccaaaacctggtataaaacaaaaaaagaaaacttcatgccaatgatcttaataaaaaatgatggaaaaattctcaacaaaatactggcaaactgaatccagcagcacatcaaaaagctaatctactatgatcaagtagcctatatccctgggatgcaaggttatttcaacatacacaaatcaataaatgtgattaatcacataaacagaactaaagaccaaaaccacaagattatctcaatagatgcagaaaaatctttcaagaaaatttaacattcttcatgttaaaaccctcaacgaactaggcattaaaggtacatacttcaaaataatgagttatctgtcacaaactcaaagccaatacactgaatggacacacagaagttggaagcatttctctttgaaaactggcacaagacaaagatgccttctctcatcactcctattcaacatagcattggaaatactggacagagcaatcaggcaagataaagagaaagaaagtcagactactcttgtttgcaggtagcatgattctacacctagaaaaccctatagcctcagcagaaaattttttttttttaatttttattttatttttttgagacggtgtcttgctctgtcacccaagctggagtgcagtggcacaatctcagctcactgaaacctccacctcctggtttcaagcaattctccagcctcagcctcctgagtagctgggattacaagccacacaacaacgcctagctaatttttgtaattttagtagagacagggtttcatcatgttggccaggctgacctcgaactcctgaccttgtgatccgcccacctcggcctcccaaaattgctgggattacaggcatgaaccaccacgcccggctccagaaaagcttttaaactgacaaacaacttcagcaaagttttagaatacaaaataaatgcacaaaaatcagtaacatctctgtacatcaacaatattgaagccaaaagccaaatcaaaaacaatcctatttgccacaaaaagaatcaaatatccagaaatatagctaaccagggaggtgaaagatctctatgacaagaattttaaaactgcttcaaaaagtaagagatgatacaaacaaatggaaaacccgtttatgctcatgaatagaaaaggtatcattaaaatggccaaactgcccaaagaaatgtacagacttaattctgtttctgccaaactaccaaaaacattcttaacgggactaaaaataactattttaaaataaatgtggaactaaaagagagcctaaatacccaaggcattcctaaacaaaaagaacaaaactggaagcagtacattacctgacttcaaactataccacagggctacagtaaccaaagcagcatggtactgttatagaaacaaactcatagacaaatgcaacagaatagagagcccagaaataatgccacacacctacaaccatctgatcttcaacaaagcttacaagagaaatgtaaaaaaaaatttctatttaataaatttgctaaaataactagctaatactacgtagaaaactgaaactggatgcttttcttacaccatatacaaaaatcaactcaaagtgaattaaagtcttaaacttaaaatgtaaaattatttttaaaaaaactttggaaggtacctaggaaatcattctagacataagaaccagaagatttcatgatggagataccaaaagcaattgcaacaaaaggaaaaattgacaaatgggacctaattaaactacagagcttctgcacagcaaagaaaactatgaacagactaactaaacaagacaaccagccaggcgcagtggctcactttaggaggccaaggcaggcagataacaaggtcaggagttcgagaccagccgggccaatatggtgaaaccccatctctaccaaaaatacaaaaattagctgggcgtggtggcacacgcctgtaatcccagctactcaggaggctgagggagaagaattgcttcaacctgggagatggagggtgcagtgagccgagattgtgccactgcactctagtggggcaacagagtgagactccatgtcaattgaaaaaaaaaaattatgtggtaaacaattagtcatatgaaaacacttctaggaggtaccaagtttcatctcataaaatttagcattaaactcagaaatcaagatgataggatatagaatacagataatcacctctacaaatttaccctgcaaagagagtaactgatgtttttatgaatctgtgtaactcaccacttatataccacgttttcttataaaaatgtattaattttgtacagccaaataaaatagattttccctattcttttccttggtagcattctaaaagctaagccttggaattctgttgaaaatcacccagccataaaataaaagacacctgagaagattcctaaactcactctgggaaagagaaaggtaaatgataatttttattttattttatttatttattttttaaacagagtttccctcttgtcgcccaggctgagtacaatggcgcgacctcagctcactgcaacctcggcctcccaggttcaagcgattctcctgcctctgcctcccgaagtagctgggattacaggcgcctgcccctgcacccagctaatttttttgtatttttagttgagacgggatttcaccatgttggccaggctggtcttgaactcctgacctcaggtgattcacccacctcggcctcccaaagtgttgggattataggcatgagccactacacccaggctgtgacactgtagcacacatagccatggtggttatcttggtttatccctagacagtactgaaacccaggatcagaaaaaaaaaacaaaaacaacaaaatgaagtgtggctgaggaaaaatcacccacatttttcgaaaggaaaaacttgacctaaaaacattctgaaaaagtctctggctgggtgtggtggctcatgcctataatctcagcactttgggaggccgaggcaggtggatctcctgaggtcggcagtttgagaacagcgtgaccaacatggggaaaccctgtctctactaaaaatgcaaaattagccaggcgtggtagtgcatccctgtagtcctagctactcgggaggctgagtcagcagaatcgcttgaacccaggaggcagaggttgcagtgagctgagatggctccactgcagtcaagcctaggcaacaagagctaaactccatcttaaggcggggcgggggaaaaaaaagagtcctgtgcctagggaaaacaaaaagaaaaaagaggccaggcatggtggcggaggcgggtggatcatctgaggttaggagttcgagaccagcctggtcaacatggaaaaaccttgtctctaacaaaaatacaaaaattagctgggaatggtggtaggtgccggtagttccagctactggagtggctgaagcaaaagaatcacttgaatcagggaggcagaggttgcagtgagcagagatcacatcactgcactccagactgggcagcaaagcaacactgtctcaaaaaaaaaaaaaaaaaagtaaagaaaaaaagaaaaggaaaagaggcacagagatttttattttttacaaacagtgtaaggggattattttttgctttcttttcaatatggaaaatattttcaaatagaaaacaaaatttaggccggactcggtggctcacgcctgtaatccttgcactttgggaggccaaggcgggtggatcacaaggtcaggagttcgaaaccagcttggccaacaaggtgaaaccctgtctcaactaaaaatacaaaaaaattaaccaggcacggtggcaggtgcctgtaattccagctactcgggaggctgaggcaggagaatcggttgaacccgggaggttgcaatgagctgagattgcaccattgcactccagcctgggaaacaaagcgagaggaaggatggaagcaaggatggaaagatggaaggaaggaaggaaggaaggaaagaaagaagaaggaaagaagaaaggaaaatttatttaagtccatccaatgatttttcaaaaaataattaaaatatctgtatcaaaaatatacagatatctaaaatatctttatctaaaacgtatctctgtatctaaaatgtacactaaaaaaaaaaaaaaaatagcccggctcggtggctatttttaagtgctgtaatcctagcactttgggaggctgaggcgggtggatcatctgagctcaggagttcgagaccacctggccaatatagtgaaatcccgtctttactaaaaatacaaaaaaaattagctgggtgtggtggcaggcacctgtaatcccagctactaaggaggctgaggcaagaaaatcgcttgaatccgggagacggaggttgcagggagccgagatagcaccattgcactccagcctgggcagcaaaagcgaaagtccatctcaaaaaaaaaaaaaaaaagaaaaaaaagaaaaaatagttgataacgtgaattgcggagaagaaggtggcatttgggaatgtcagaaataaaggaaaatctagtttagtttttttttttttttttttccagagggagtttcactctgtggcccaggctggagtgcaatggcgcgatctcggctcactgcatcctccgcctcctgggttcaagcgattttcctgtctcagcctccctagtagctgcgattacaggcgcgcgccaccacgcccagctaatttttgtatttttagtatagacggggttcaccatattagccaggctgctctcgaactcctcacctcgtcatccacccacctcgacctcccaaagtgctgggattaaaggcgtgacccaccgcgcccggccgactctcctgtttctaatagaccaaaagagggactagaaatgccacggaccaaagctcttcctattcatgaaactgcatcacgagtcaggattctctcctgacgaccctcctgtggcccctgcacaatttgggagagacgccgcgttgcggctgcagagctgcccacagagggctgcaggccgggacacagtcactgcgcagagaagagacaggacgcccggggctgcctcccagagcagccgccatcttatggctgaaggggattgaggccgagctgggcaagaactccggcacgcgcagattgtggagctgactgcgggaaggcctgagtcacgccacagccccttccccctctcgggatgtcggaccggcactctcaccatttctaggcttccggggggtcctggcgtcttagctgtggatcccccaatacccgcaggtcacagagccacagaggctggacctctagcagcagaggacacagaagaacgaagacgagacgcagagctccaactgcagccagagacaaaggccccgccacatcccggaagccgccctgtcctctcctgccccgtgcctgattggacggtttccagcccagcgtccctgattggataacttctaaggtcctgcccccgcaaaccctgaatgaaagatgtgatcagacgctgggctgaaagaagaaagaatgacagcctaggctgccgccttttcaggcagggcttcctccctgagcagagcaggcccaacccagagggtatttgcctttaaccttgtgtataaggtcatcttcacttataagtaatatactatatggatactaaaaaatgaaaacaattgtttttgaatttcagcttttatgaccttcctggcttctggccctttgagtaggaagtattacaaacattgaatattttattatttatcctctgtggggtttttcttattcttgagagggagtctctgttacccaggctggagtgcagggtcatgactgcagctcactgcagcctcagcaatctaggcttgagcaatttacctgtctcagccttctgagtagctgggaccactggcatgtggccccatgctcagctaatttgttatcatatttttatttgtagagatgaagcctcactagatagcccagaatggtctcaaactcttgggctcaatgaatcctacaaagtcagcctcccaaagtactgggattataggcatgaaccatcacattcagactgaattattttatcaaaaaatttttttaaagcattgaggtccattaatagaattcaaggaaatgttatgcacatgttttaaaagcaaattaaaaagcatatacaaaaagagaacattttttaaaaaactaaatataggtaatgttaccagaaaaagtttagatctcctgactttaagttgcagtatgctaatggaatattcttagtggatagtattccattttcataagaaattcaaaacaagataatttccaggttttagaaactgatgtaaaacataaaaatatagaaaatctctaatgtgttcccatgatatagtattacttgaaatataaactgggcaaactcagcaaaagacaatttaatctcaaatttcaaaataggtacagaagttctaatggaataataaatggaatccaggattttattcataaaaaggctaaaaagtgaccattctctgtgattttgaaagtaggaatttgtgtaaacagatgtgtatttgcatctacatttgcctacacttactttttttttttttttttttttttttttgagacggagtcttgctctgtcgaccaggctggagtgcagtggcacaatctcggctcactgcaacctccgcctcccaggttcaagcgattctcctgactcagcctaccaagtagctggggatacaggtgcatgaccccatgcccagctaatttttttatgatatattcatttattcagattactcgataattaaaaattatattttctatgaataccagctaattttttgtatttttagtagagacagggtttcaccctgttagccaggatgtctcctgacctggtgaactgctcgccttagcctcccaaagtgctgggattacaggtgtgagccaccatgcccagcagcttttaaacattttaggaaagcatgagacatcaatcaatatgtataagatcttccttccctacctttttccttctccacctcctccttcctctctctctttcttggtttgatccagtaatgcaggacaacttgaggtgagggcttccaggtcataagtaaataagagataaaagtctggattcttgagtccttgataagcattcaactgaatacaatttagtctggctcagtgaacctgcatatctaaattaacagcagtgcagaggaagcaatcagatgtgcatttgtctcaggcgaggctcagagaaatgactctgagttctgtctgtctttggttctcaaggaatttccttgttggctaattgtaaagaaagtatgtagcttttttatctttgtagctatcttatttagaaataaaatgggaggcagatttgcctgacatagttctcaacttgacttttctagtggcttagtaattttggcatcaagagatttattttcctttagcagtggaaacctctttcattatcaagtgtagaggttaataaaaaaaactcataaacacaaatataattattgctacatctttcagaatagcccattctaaatttttttttttttttttggagatacagtctcgctctattacccaggctggagtgcagtggtgcaatctcagctcactgcaacctccgcctcctgggttcaagcaattcccctgcctcagcctcccgagtagctgggattacagatgtgcgctaccacacctggctaatttttgtatttttagtagagacggggtttccccatgttggccaggctggtctcaaactcctgacctcaggtgattcgcccgccttggcctcccaacgtgctgggattacaggagtaagccaccgcacccagggtagaatagcccatcctaatttaattctcatttactctagacttttttcataattttatagtggatcttaatgttggaggcattcaaaccagagcaactcaatcttgaatagcagctgtgtgaaatatgctgaaacctacttggctgcctccccaggttaggcattcttagtcacaggatgagataggaggtcagcacaagataaacaagatacactgcacttagaaatttgtcgtaatcttctctgttagcagggtgcaggcagaaacacagaatcacatatttagatcatggatgcagagatatgtcacaaagctcctgtggttagggtcaagaaaggagcttcccaccccctagatgttggtctcagcaatatatcacaatacccaaattatgtgagacccaggcaaaaaggagagtcacatcacctaggtgctgggtccagtgatatttcacaattatcctttgtagcaggttctagtcaaaaaaggagagtcacaacatttaagtgatgaagaaaaaagaatatgtcataatacctttctgaacagagcccattcaggagactcataatacctaggtgttggacccagccatatatatcacaatacaaaatgtatgcagagatcaggcaaaaaaaaaaaaaaaaaaaaaaaaagagatcacataacctaagagctgggcccagctacatatcacaagcaccccagtggacaaggccaaaacatgagagaagagtcacatcacataagtgcttgactaagcgatatgttacagtccaaactgtgaacacatcccaggaataagaggagtcacatcatctaagtaatgggcccagagatatgtcaaagtaactcctgtggagaggaaccaggcagaagaatcacatagcctgtgtgctaatcgcagcaataagtcactctcttttatgggagcatggccatagcaggaaagaagggtcaaattatttggtttctgggctcaaatatatgtcacaatctctcctatagggaaaagccaagtaagaaagtcacattatatggatgatgggttcacaaatatgtcactatgcccactatgggcagggttcaggcaggaggctcacattaccttagttctgggccaaacaatatgtcacaatgcctgatgaggaaagtgctgaggaaaaacgtaacttcatttttggtgtttagcccagcagtatgtcaaaatctacattgtgagctgaatgtaggtagaaaaagaagcatcacaacagctaggtgctggcccagtgataggtaacaattctttctgtaagcagcaacctggtagaaagagagtcacattacttgggtgatggatgcagatagattataatgcttcctgcaagcaggatccagcaaggaaagttacatcacctggatgttgcacatagcaatgtcacaatggcccatgaagatagggcacaggcagaagagtcacataaccagggtgtggggtccagtgatatgtcacaatgcccccctgtgggcagtgctgaggcaaaagtacagagtcacaccacctagatgttggattcagcaatgtgtcacaatccgatctgtgcactaggcaccaggcaggagagtcaaatcactcaggtgctgggcaaaggtgtatgttacaatcacagtcacaaaaaaatgtaggaatgaacaatcccacacatcccatttcttagtattagagtcaacacatgttgtatgttgagtccaagtacacaagtcacaatctcaacggtggactggatacatccatgagagcctcaatctttgccgtggactgtgtccccttagtggagtcacagcctcacaggtatgctgaatcttggtttgagagtcaccagcccacgtgtgaaccgaatccacgtttgagagtcaattttccaaccacctccaggtgtgagattcagaacttcaacagtgagctgtgttcatgtggaaagttgtcaattttcactgttggctgggtttgcatacgagtgtcacaatgtcacctgggtgctaggccctgttatagaactctctatactacctgagggctttatacaatatccatgatggtcacaatttgctctgagacttttttttctaatacaaactcataatcatacctgtggacctaggctcatgcattagagtcaacatctctccaattggctgggtctagagaaaagagttctcacctgcctatgagctaggtttagaaatgagtcaccatcttaactgttgtcacatgattacatatgacagtcacaatttttactgtggactccattcacgtgtgaaattcgtgtgagggtgacaatgctaacatttggtaggttgtgcatttgagaaacagtctcacctgtgtgcttggccctatgataacactctctgtaccgtccaaagactttatacaaaatgtgaaagaatggtaatccaggactttacctgtttctctaagtctagctaccagcaccagtatctctgctatggactggtttgtggtatgagtatcatcatcgcaactgtgaactgggctaaagtgtatgtcacaatctaacctgtgagtagaaagtaaatgggagagtaacatcacctgcatgctgagtcggaaatatgtcacaatttttcaggacaaggaccaggcaggagagtcatattacctggttgcctgtccagggttatgttacaattccttctcgaaagcaaggcacagacaacaaagtcacgttacttggtactggacccagctatgtcacaattctctctgcaggcaaggcctgggcacaagaaacacagcacctggttgctgaacccagagatgcaacacaatctttctctgggcatggtgcagatggaagaggagagtcacacctccaaagtaatggatgcacagatatgtcacaaggtgcttcccacagacagggcccaggcaagagctctttacccatttggtttgagccactgatgtgtcataatacccacaatacaaggggcccaggttaaagagagtgatatcacctagatacagagtccagtgatatgtcacaatcctccccttttacagggttcaggtagaagttacatcacttaggtgataaacaaatgacatgtcataattcctctattagcaggtgaagagagtcccatcacctaggtgttggactagccatattttaatatatacaatacacaattcaccaatacctaggtgaaacaaattgtgtatattgaaatatggcagggtccaacaactaggtgatgtgactctcctgcatgggccctgctaataggagaattatgacattatctttctgtttatcacctaagtgacgtgactctccttttctaactgaaacctgtagtaggagaggagagtcacatcaccaaggtgctaggcccagtgaaaaatcacaatccctggccaggcatggtggctcacacctgtaatctcagcactttgggaggcagaggctggtggttcaccaggtcaagagaacgagagcatcctggacaacgtggtgaaatcctgtctctaataaaaatacaaaaattagctaggtatggtggtgcatgcctgtagccccagctacttgggaggctgaggcagaagaatagcttgaacccgggaggcagaggttgcagtgagctgagatcgtgccactgcactccagcctggcaacaaagtgagactccatctcaaaaaaaaaaaaaaacaataaaataaaaaaatcacaatcccgccttgggcagaaaccaagcagtagacgagggtcacatcaccttgttactaggtcaaaaaatatggcacaatattttctgaaaaaaaggggaccgtgcagcacagtcacctcatctaagagagggctccagagatatgtcaaaatgccctatgtgggtaaggctcataaagaagagtcacataacctaggaattgagactagttatatggcacaatcaccccagtgggcaagactgaggcatggaacaaaattcagattatgtagatcctgagaaaagtggtatgtcaaaatctccactgtggacaagtttcagagacaaaaggagagtcatataatctagtttatgggcccaggcaaatgtcataatgtcctctctggacagggaccaggcagaaaaatcacataacctgtggtcagggcctagtgatacgtcaccccctcttctgtggtcagggcccaggcaggagagaagagtgagatcatgtaggtgcttggcacagatatgttacaacgtctcctagggaaaagcccatgtaaaggtgaagagtaacattaaatagatgggtccagaaatatggcaaaatgtcccctgaagccagggtctaggtaggagattcatatcatctgggtgttagatccagtaatatgttacaatagcccatttgggcagggcacagaaaggagaaacacattacctgggtgcagggaccagtgatatgtcacaatgccctctgcgacagcaccaaggcaagagtatagggtcacatgatctacatgctgggtccagcgatatgtcacaatcccatctgtgtactgggcccaggcaggagagtcaaatcgctcacattctgagcagaggtatgtgtcacaatcacacctgcagaaagacccagaaatcagataaaacagttcttcacgtgtcttcattctaggtatgagtcaataccatttggatattgggtctaagtacacaagtcaccatctcaatgtagatgaatccatgcataacaacctcaatctcttctgcggactgtgtctcttagtaaaatcatagccttggccaggcgtggtgcctcacacctgtaaccccagcactttgggaggccaaggcaggtggatcacctgaggtcaggagtagagaccagcctggccaacatggcaaaatctcatctctactcaaaatacaaaaattagctggatatggtggcgggcgcctgtaatcccagctactagggaggctgaggcaggagaatcacttgaacatgggaggtggagtgagccaagatcatgccattgcactccggcctgggcaacaagagcgaaactcggtcttaaaaataaaaaaataaaacagcctcacaggtgtgctgaatcttgacctgagagtcaccaatccatctgtggaccagattcacctataagagtcaattttgcaattttccactgcctccaggtgtgacattcagagcttcagaagtaggttatgtttatgttaagggatgacaatatttactgttggctggttgcgcatatgagtataacaatgtcacctgtgtgctgggccatgtaagggcactcagtgtattacccgagggctttatacaatatacaggagagtcaaatccactctgagatctttgtgattgtataaaaccatgatcgtacctgcggccctaggcccagactggggcaggtggatcatgaggtcagtagttcaagaccagcctgaccaacatggtaaaaccttatctctactaaaaatacaaaaaagccgggcatatcccagctgctcagaaggctgaggcaggagaatcacttgaacctgggaggtggaggttgcagtaaggtgagctcgtgccactgtactccagcctgagtgataagggagactctgtctcaaaaaaaaaaaaaaaaaaaaaaaaagatacacaaaacacaatttcatctgtgtttttggcttgtgatgacactctgtgccacctgagagctttttataatatctgagagagtggtaattctccatgacctttgcaaaaaaaaaggaaacttagaatcatgtttgttttctcaagcctagctaggcaaggtgtatctcttttattgcctggttcaaggtatgagaatcatcatagtaatttgtaagctcaggcaaaatatatgtgacaagggccgggaaggtggcttacacctgtaatcccagcactttgggagaccgaggcaggcggaccatgaggtcaggagatcgagaccatcctggctaacacggtgaaaccccgtctctactaaaaatacaaaaaactagccaggcatggtggcagacacctgtagtcccagctacttgggaggctgaggcaggagaatggcatgaacccagcaggtggagcttgcagtgagccgagattgctccactgcactccagcctgggcgacagagcaagattccgtctcaaaaaaaaaaaaaaaaaaaaaaaaaatatatatatatatatatatatatatgttacaatgttacaattacacctatgggtaaagagtgagcaggagagtcacatcacctggggctggtctagagatatgtcacaatcttttttgagtgcaaggacgagacaggagagtcacatcacctaggtgcttgggcagggatgccttaacatctcttcttgtaagatgggcacgggcagcaagttacaccacctgggtgcagggcccaacaatatgttacagtgctctctatgagcaataccctgagaggtgagacacattatctggttgctgatcccagtggtatgttacaatgtttttggggggcatggtgcatgtaggtgagaaaagtcacatattataattgatggatgtcaaaatatgtcacaaggccccctgtgggcaggcccaggcagggacctcccatcccctaatgtcagactcagtaatatgtaacaatacccaaaatatgcaaggtccaggcaaaagatgagagttacgtcatctaggtgctgggtccagtgatacatcacaatcctcttttggcagggtgcaggctgaagaagagtcacatcacctaggtgatgaatgaaaagatatgtcataatactctcgtgaccagggcttatgtaggagactccttggtgatagacccaggtacatgtcacaatatgtatgcaggggccaggcgcagtggctcacgcctgtaatcttagcactttgggaggccgaggcgggcagatcacctaaggtcgggagtttgtgaccagcctgcccaacatggagaaaccctgtctctactaaaaatacaaaattagccaggtgtggtggtgcatgcctgtgatcccagctacttaggaggctgaggcaggagagtcgcttgaacccaggaggcagaggttgtcatgagccgagattatgccattgcactccagcctgggcaacaagagcgaaactctgtctcaaaaaaaaaaaaaaggatgcagggcccagacaagagaagagtcccatcatgtaggtgctgggcccagtgatacatctaaatctttttttgttcagagtccaagcagtagagaagaagtcacattacctaaatgctgcatccagcaacatgtcacaatacccggataaggagagcccaggcagaaaagtcacatcacctaggtgaaaggcccaggggtatttcctagtgctacttgtttgcagagctcaggaagaagacaagagtcagataacgtaggagctggtagcacaatcactacagtgggcagggtctagctatgagaggagagtcacatcgcatgggtgctgggccaagcgatatctcacatttcttactgtggacagattcagaaataaaaaggagacctattatttaggtgattggcccagagttatgtcacaatgaccacctgaacagggaccaagcataagaatcacatcacctgtgtgctgggccaaacaataagtcactctcttttctgttagcacaacccaggctcaaagatatattacaatctgacctatggacaaagcccagataaaagaggagagtcaaataaaatagttgatgagcttagatatgtgttaaaatgttttctgtaagcatggtccaggcaggaaactcacatcacttgggtgtaaaacccagcaacatgtcacaatgtcttatgtgagcagggccaagaaaaaaatagagtaacatcactttgatgctgggttcaccaatatttcacaatcttccctggaggaaaaactaagaaaaaaaaatcaaatcagctatgtgctgcaaaatgtcacagaacttcctgtaagcagaaaccaggtaagacaagagagtcaaatcacctgtgtgactggtgcaaagacatttcaaaatgccacccctaggcagggtccaggcataaaagttatatcacctggctgttggacccagcaatatgtcacaatggcccaagtggccaaatcgtaggcagaagactcacatgtcagtgcagggcctagcaatatttcataatgtctgctgcaggcaaaacctaaaaccagggaaaaatcccatcaggtaggtgctgggcgtagcaatatgctacaatgttcctgtaagcagggaccagacagaagaagactgtcacatcacctggatgctgggcccagagatatgtcaaccatcatttctgtaataaagacccatgcagaaaaaacacagcatctggttgctggccacagcaatgtgcctcaattttccctgtaggcagggtgcaggcagaagaggagagtcacatctcctagttgatgaatgcagggacatgtcacaatgctccctgtgggaagggcccaggtaggagacttccgacctttaggtgttcagctgagcattatgtcacgatacacaaatatgaagggcctaagaaaaataagagtcacatcaccttgatgttaggtctctgtgagcagagaccaggcaggagaagaaagtaacattactggtcaggcgcggtggctcacacctataatcccaatactttgggaggctgaggagggtggatcacttgaggccaggagttcgagaccagcctggccaacatgctgaaaccccatctctactaaaaatacaaaaattagctgggtgtggtggcacatgcctgtagtcccagctactcaggaggccaacgcagaagaatcacttgaacctgggaggcggaggttgcagtaagccaagatcacaacattgcactccagcctgtgcaacagagtgagactccgtctccgaaaaaaaaaaagaaagtaacatcaccatggtgacgggcatcattgagttacatcacaaagctccatgtaggcagggtccagagaaaaggtgttacatcccctgggtattggacccaacaatatgtaacaatttcttttttatttttattttttgagacagagtctcgctctgtcacccaggctggagtgtagtggcgcatcttggctctgcaacctccatgtcccgcaattctcctgtctcagcctcccaagtcactgggactacaggcacacaccaccatgcccggctaatttttgtatttttagtagagacgtttcaccatattgatcagactggtcttgaactcctgacctcaggtgatgcacccgcctcagccttccaaactgatggcattacaggcgtgaggccactgtgcccggccttatatgtaacaatttgttgttgttgttgttgttgttttttgagacagagtcttgctctgttgcccaggctggagtgcagtggtgtcatgtcggctcactgcaaccactgcctcccagattcaagtgattctcttgcctcagcctcccaagtagctgggattacaggcatgcgccaccacacgtggctaatttttgtattgttttagtagagatggggtttcaccatgttggccaggctggtcttgaactcctgaccttaactgatccactcatctcagcctcccagagtgctgggattacaggcatgagccaccatgcccggccatatgtgacaatttctaatgtgacatattgtgccataatatggcacaacatgtagggcacaggtgagagagtcacataacatgggtgcaggattcagtactattttacaatacccaaaatttgtgaggtcccataaaaagaggagagtcatatcacctaggtgctgggaccagtgatatgttacaattttacctttgggctgggaccagacaggaaactgaaatcactcaggtgctggccaatgtcacaaccacacctgcagaaaggtccagtgatcaattaatcccgtacaggtcccagttctaggtatgagagtcaccacattctctatgttgggtctaagtacgctagtgacaatttcaccaatgaattgaacctgtgcataagagcctccatctctcttgtgagctgtgttcgctctggccctcagcccaggtatgagtcaacatgtcctcaggaaggtagacttctcattggttcagattgaaaaattctcacctatgaactagatttagaaatgagtcatttttcaaactcctgcggaatgttcacatataacagccacaattttaacggtggactgtgtctgtgcatgagattcaggacctcaccagtgggctccatcactgtgtgagggtgacaattctaacggttggtggggtgggcaaagaagaaacacaatctcacctgcttgctgaactctataatgacactctctgtaccacgagagatttatatagtattcaaaacagtggtaatttggctgggcacggtggctggcgcctgtaaccccagcactttgggaggccgaggcgggtggataacctgaggtcgggagttctagactagcctgaccaacactgagaaaccccgtctctactcaaaatacaaaattagccaggcgtagtggcacatgcctgtaatcccagctactcaggagactgaggcaggagaatcgcttgaacccaggaggcggaggttgcagtgagccaagatctcgccattgtactccagcctggacaacaagggcaaaaccctgcctcaaaaaaaaaaaaaaaaaaaaaaaaaaagtggtaattctcagttgggcatggtagctcatgcctgtaatcccaacacctggggaggccgaggtgggtggatcacctaaggtcaggagttcaagagcagcctggccaacatggcaaaatcctatctctactaaaaatataaaaattgcccaggaggcggaggttgcagtgagctgagattgcaccactacactccagcctgggcaacataaacgaaactccatctcaaaaaaaaaaaagtaattctctatgacatttgtacaagaaagagacccaggataatactcataaccctaagcctagctataagaggcagcatctctcttactggctggttgagggtagaagagtcataattgcacctgcaaactgggccaagctatatttcacaatcccacctgtgaatagggagagaggagtcgcatcacgtgcgttttgggtcaggaatatgtcacagtcttttctgagggcagagaccagacaggagtatcacatcacctgaatatttagccaggaatatgtaacaaacttcctctgaaagcaggacacaggcagcagagtcacatcacctgggtgctgagcccagcaatggataacaatgctctctgtggtccaggcccaggcaggagagacacattacctgagtctagtgataagtcaaaatttttcctgtaggcagagtgcaggcaaaaatggagagtcactctcctaggtgattgatgcagagatatgtcacaaggccctctgtagaaagggcctgggcagggccagacacggtgggtcacacctgtaatcccagcacttcgggaggccgaagcaggtggatcacgaggtcaggagttcagaccagcctggccaacatggtgaaaccccatctccactaaaaatacaaaaattagccgggcatggtggcaggcacctgtaatcccagcacttcaggagactgaggcaggagaatcatttgaacctgggaagcggaagttgcagtgagccgagatcgcaccactgcactccagcctgggagacaaggcgattctctgtctcaaacaaacaaaaaaagaaaaagaaagggcctgggcaggagcctcttattgtataggtgttagacctagtaacatgtcctaacgtccaaaatattcagggactaaggaaaaaaggagagtcacataacctgagagcagggcttagcaatatgtaacaatgcaccttgtggacagtgccaaggcaagaaaaaagactcccatcacctcagtgaaaggcccagctatgtgtcacaatgccatctgtgggcagcaccaaagctggaaaaaagtcacatcttcaaggtgcaaagtcaagcgatatgtcacaatctccatctgtgggctgggccaaggcaggagtcaaatcactaaggtgcttagtagatgcatgcaatcttacctgcaggaaagtccaggaatgagattagaaattccacacatgtccaggttccaggtatgagggtcaacacctcctgtatgttgggtctgtctaagtacgtgagtcacaatctcaatggttgacggtattgcaagagagccacaattttgtctgcggactgtgcttttcagtgcagtcacagcctcacatgtgtactgaatcttggtctgagagtaaccaacccacctgtggaccaggcccgcatatgaaagtcaattatccaacttttgacagcctccgagtgtgagattcagaaatgttcctaagaggccgggcgcggtggctcacgcctgtaatcccaggacttttgggaggctgaggcgggcgtatgacctgaggtctggagttcgagatcagcctggccaacatggtgaaaccccatctctagtaaaaataaaaaaataaataaataaaaattagccgggcctggtggtgcgcacctgtaatcccagctaatcggaaggctgaggcaggagaatcgcttgaacctggaggcgaggttgcagtgagccgagatcgcgccactacatttcagcctgggcgacatagcaagattccctctcaaaaaaaaaaaaaaaaaaaaaaaattaacaacagaaactgaagaccccagggccgcagctcctcctgcgcacacaccgagtcgggattctgccccgatcatccgccgggcatccctgaacaatctgggaaatactcggggctgctggtgcagagctgaccagagagctccagacagggtaccgcgcaggaatggggcgggacgcgggaggctcggctgcgggcccagccgccatcttgcggccagaggggcctggggcggagctgcgccagcgaccaggactcaggagcggactgtgaggaggccggtcccgccactttcacagcctgctctcccctctcgggatgcctaaccccgcacactcaccatttcccagcttccaggatgtccgggcatcttagctgtgcgtctcccaggacttgcagatcacagggtaacggaggctgcgacaaagtcaccggggattcccgagttggagaacgcggaaaagcagaggcgggtcccaaggtctagcgggagctggagacaaaggccccgccaaaagccggaagccacggccccctctccaactgcgcgtctgattgggtggttcccacgccagcgccactgattggataaagctccaggacccaccctccctagcgtttgcgcattttatggacagggaaacaggctcaagtaggcggggcacatgcccagggaattacagctaatcaagtgagctgagccttgaaatgcacttgcttttttccttccctgggtcagcttgtatagtgcatcttagtagctactgaaggggaagaaacagaacatttggatacccttttaacaactttttaattatgttgacaatgcagcaaagaccctcgtcccatccctgagggtctctctcaccgtgctgtaccacactgctgtacacatcttgggatgaccattaggaacggggaagcagctggggctagggatagataaacatgaattatgttgcctaaatttgctcattttagaaaaacatctaaaccaatctctgtgaagtggctattatcagggtaattgtgccctgactgtgctacatctcaatctgacttctctttttttaaaataactgcattactctcattaacggggttatttcactttctattggaaaatcgccaattgtcctctgtaggtgtcctgatgtaatttgctagtttagaccctggaggtagggataagaaaatacttgagctacatcagaacacctaactcaactggaggatatatagaaattccttaataatatctaacagttttctcaatacccattatatttaacagtgatagcttggagggctgagaggtgaaacagatgacacaaccttagaagttcacttttgttgccggcgtggtggctcacgcctgtaatcccagcactttgggaggccgaggcgggcggatcacgaggtcaggagatggagaccatcctagccaacatggtgaaaccccgtctctactaaaagtacaaaaaaattagccgggcgtggtggagcatgcctgtaatcccagctactcgggaggcagagccaggagaatcccttgaatcagggagttggaggttgcagtgagccgagatcgcgccacagcactctagcctagcgacagagcgagactccgtctcaaaaaaaaaaaaaagattgtcttcatccaagccagtttccatttcttggacacacattgctggtcagccaatcagatgctggtattgaggtgaaaacagaaacgatttctgcctctggattctctgagattcgtgggaaaaatggtatccctaaaaaacaaagcaagacacaaaaacctgaccccggtgagatggtgcaagaacttgcaaagtaaaatgcacttggaaactccctgggacatagtgcagtgtctcctgagaggtcataaaagaggtgggtttcagaaaataaatctaatcacgcattccatttgtttaaaattctcatttaccctttttttttttttcctgtaaggtgtgttttttatggctgagtgaatttcaaacagaattccaaggcttatcttttaaaatgctaccaaagaaaagaataggtaaaatatattttccgttttggctgtaaaaaatgcatacattaaaaaaaaagtggtagataatgggcaagttacaagattcgcaaaaacatcagttcctctttgtgcagggtaaatttgtgacattgactatacctgttctacatcctgttatcttgatttctgggtttaatgtcaaattttgtaagatgaaacttggaacctactaaaagtgttcccatatgactaattactacatgatttttaatggaaataatataataacacacttattgtctgaaaggaatagatacttttgcttttcttactgaggtatgaaatgtaagcaccttaaaatttcctctttttttttgtggcagagtctcgctctgtcgcccaggctggagtgcagtggcacaatctcggctcactgcaacctttgcctcccgggttcaggcaattctcctgagtagctgagattacaggtgcctgccaccatgcctggctaatttttgtatttttagtagagatggggtttcgccatgttgttcaggctggtctcgaactcctgacctcaggtgatccaccctccttggcctcccaaagtgctgggattacaggcatgagccaccgcacctggtctcctttttttatataaacactgtttgggtaatttcgctggatttttcaaacacttaaacttccaaaaaccaagtgaataactctgacatggaaattaaagcttgcacccagtgactccaagctaaagctaatattgatcctgcaataggaggttattaaaggcccagtttgttcttccttgggagcttcctgggcagatgtccaagtcctgaaagaagactatatactgagagaagctacagagccctggaaagctggggacccacaggcagatgcatttaaggttaagatggaaggggactgacatactcttttttttttttttttttttttgtgagacagagttttgctcttgttgcctaggctggagtgcaatggcgccatctcggctcactgcaacctctgcctcctgggttcaagtgattttcctgcctcctgaatagctgggattacaggcatgcaccaccacgcccagctaattttctatttttagtagagacggagtttctccatgtgggtcaggctggtctcaaacttctgacctcacgatccacgtgcctcggcctcccaaagtgctgagattacaggcatgagccaccgcgcccggcctgaaagattctttttttttttttttttttgagacagagtctcgctctgtcacccaggctggagtgcagtggcacactctcggctcactgcaacctccacctcccgggttcaagtgattctcctgcctcagcctcctgagtagctgggactacaggcgcgtgccaccacgcccagctaattctttgtatttttagtagagacggagtttcacagtgttagccaggatggtctcgatctcttgaccttgtgatccacccgcctcagcctcccaaagtgccgggattacaggtgtgagccaccgcacctggccccctgaaagattcttcctgaagataatattgttcttgttttgaggccgtttctaaaagttgtaaaataaaacagatttatgtagaataatttaaaatccaaagaagtattgaaacaggaagaagtactaattataagagcattaaggattgcaaaggataggcagaccagggctttctttcatagggaggagcaaacaagatttaaagataaggtaggaggagaatggcaaatggagagtgaaaaaaatcagattctggttcaggagaatcttaggagggacataaaatgggattgtattttggctcagactgagggtagggtagcttaaagttcaggagtctgtgggaaagaaataaacttaagtgaggtttgatttagaagtagtttattttgactgctgaagacaaatttagctgattttttaatgagaacaaggagaaaatgtgcagagcctatttctggctatgtggtagcaccctgtaattcataattggaaaggaatttatgttcttcgtctttccccaccttttttttattctgtacattttttccatttcagttttcctgagttgtatcttatataattaactggtcaccataactgcagtgttttgctgagttctgtgagtagctctatcaaattatttaacttgagggaggttatggaggtcctcactttttcaaaagtacctcagaagcatagataagcccgtggggtttgtgagtggcatctgcactaaggaaaaacttatggaaccgaaccctgaatcagggtctgtgttgattctgggtggtatcagaattcaaatgttagacaataggttggtgttggagaattgcttggtgttcagcaaactctataggtttgccagaaaaacaatataatagagacctggcctggaataaaactctgggtgtctggaaatggaaagctctgctctcctgtacacaggctgtcacactgcccattgtcctgtgattccaggtctactaccagtatgagagaagactgaaaacttagaagaaaactactttggccaggcacggtggctcatgcctgtaatcatagcactttaggaggccgaggcaggcggatcacgtgaggtcaggggttcaagaccagcctgatcaacaacatagtgaaacccttctctagaaaaatacaaaaattagccaggtatggtggcgggtgcctgtaatcccagctacttcagaggctgaggcaggagcatcacttgaaccggggaaggtggaggttgcagcgagccgagattgtcgtacctgagcgagttagcaaaacgccacactttgagacgaattaagagtcctttattcagccggcggccaaagagactgctaaagctcaaaattctctcggccccgaggaaggggcttgattaacttttatactttggtttaggaaagggaggggagcttaaatgcaacaactcttcagaagtaaaaacatgcaagaaattaaaaggacaaatggttacagagaaacaaacaacttaaaagacaaatggttacaaaaaaagcaaaggtaccaggtgcggggatctaaatccttcataagagttagatatgggcactactccggacacaaactcaaggctttatggtgttatcttttgagcaaaatcctgggaacttcatacatggtttgtttcggtaccttatcagttaattgaattcttttgatatgttgagaatctgtttacacaagttaactccttgaagaagggggtgggtaaggagtccttaatgtcttgtaaatcacgggggccagatggagttcgtccagcttttctcagctaagggagagtttattcatgtggaaacaagtctaggtgattaagggagcaaaagagagagtctaaaaacagggttagtaaaaacaaggttgggcattataacacttggctgtagggtggacccagtgcaccactgcccacagccactggctggcttctcagttgagccaccagtttgatcacatatgggctgtgagctgcaggtgttacacttggccaccagctccaaatattgaaggtcgaccttaatatttaatatcaaacatttaaatatttacacgcagtagtgtctcctaggtccagcagagggctgtgatcatggctcgctgaggcctcgaacccactcccctgccctagggctcgcccacgtgggcctcccatttccctcttctgaggagctggggccccagtgatcttcctgtgatttttttttctagttccacttccattttctttttgcatcactttagttgttgttttcctttgttctctgtctctttatgctccttcctgcacactaaagttgttgttttaatttctttctttcttcttctttttctttcttttttctgagtgaagtcttctcactgtcatgcaggctagagtgcagttgggcaaccatagctccctgcagcctcgacctccctggtctcaggggttgctcctgtctcagcctcccaagtggctgaaactacagggatagcttgatcacgccactgccctacagcctgggtgacagaagaaaaccctgccagagggagatggggggtacagttaattaggatcttatttacctttgttcactccgttaaaaaaattttaatattgtttgttctttctttgtcacttgttactgtttgtttttattattattattatttatttttatttttagacaggttctcactttgtcacccaggctgcaatacagtggtgtgatcttaactcacagcagcctcaacctcccaggttcaagcaatcctctcatttcagcccccacactccccagtagctgagagtacaggcacacaccacccgccactggctaaccttactttgtgatttgtacattttatttttgtagagatggggttctgtcaggcctctgagcccaagcctgcacatatacatccagatggcctgaggcaactgaagaacaatgaaagaagtgaaaatggccagttcctgccttaactgatgacaatccaccattgtgatttgttcctaccccaccctgactgatcaattaaccttgtgacattccttctcctggacaatgagtctcagaagctcccttaccgagcaccttgtaatcccccccaccccgctgcctgcaagagaaaaattccctttgactgtaattttccactacctaccccaatcctataaaactgccccacccctatctccctttgctggctctgttttcagactcagcccacttgcacccaagtgaaataaacaaccttgttcctcacacaaagcctgttggtggactctcttcacacagatgtgtgtgtcatttggtgctgaagacctgggacagggggaatcctttgggagactggtcccctgtactcaccctcactccatgaggagatccacccatgacctttggtcctcagaccagcccaaggaacatctcaccaattttaagtctggtaagcggcctcttttttttctcttctccagcctttctcactatccctcctttcccttcctggtagaaacagaggagaggcattttattcgtgaactcaaaaccctggcattggtcacagactgaggaagacagtcttcccttggtgtctaagtcactgcagggacacctgcctgattattcacccacatttcagggacgtctgatcactgcagggatgcctgccttgatccttcaccttggtggcaggtaccacctccccttggtggcaagtaccacctcccctagatggcgagtaccacgccccctctctccatgtctctaccctctcttttctctgggcttgcctctttcactatgggcaacattccattctccattcccccttcttctcccttagcctgtgttcttaaaaacctaaaactccttcgactaacacctgacctaaaacctaaacatcttattttcttttgtaatactgcttggccccaacagaaactcgataatagttccaagtgggcagagaatggcactttcaatttgcctatcctgcaagacctagacaatttttgtcataaaatgtgcaaatggtctgaagtgcctgacttccaggcattcttttacacatcagtccctccctagtctctgctcccaatgcgactcatccgaaatctttcttctttctctcctgtctgttccttcgatctccaccccgagctctgagtccttggaatcttccttttctatggacccatctgacatctcccctccaccccaggccgctcctcaccaggctgagccaggtcccaattcttcctcagcttccactccccaaccctataatccttctgtcacctcccctcctcacacccagtctgacttacagtttcattccatgactagccctcccccagctgctcaacaatttcctcttaaagaggtggctggagctaaaggcatagtcaagattaatgcccctttttctttatctgacctctcccaaatcagttagtgtttaggctctttttcatcaaatgtaaaaacccaacccagttcatggcccatttggcaataacccttagacactttacccccctagacccagaggggtcagaaggccatcttattctcaatgtacattttattatccaatccactcccaatattagaaaaagctccaaaaattagattccagccctcaaaccccacaataggacttaattaacctcacctttgaggtgtacaataataaagaagaggcagccaaatggcaacatatttctgagttgcaattacttgcctctgctgtgagagaaaaaccacagccacatctccagcacacaagaccttcgaaacacctaaaccgcagcagccaggcattcctccaggacctccttccccaggatctccttccccagcatcttgcttcaagtgccagaaatctggccactgggctaaggaatgcctgcagtccaggattcctcctaagccctgtctcatctgtgtgggaccccactataaattggactgtccaactcacccagcagccactcccagagcctctggaactctggcccaagactctctgactgactccttcccagatcttctcagcttagcagctgaagactgatgccgcccaactgccttggaagcctcctagaccatcacagacactttgggtaactcctacagtggagggtaagtccatccctttcttaatcaatacagaaactacccactccacattaccttcttttcaagggcctgtttcccttgcatccataactgttgtgggtattgatggccaggcttctaaacctcttaaaactccccaactctggtgccaacttggacaacattcttttatgcactcccttttagttatccctatctgcccagctcccttattaggtcaagacattttaactaaattatctgcttccctgactattcccgggctacagccacacctcattgtcacccttttccccagttcaaaacctccttcacatcctccccttgtgtctccctaccttaatccacaagtatgggatacctctactcctaccttggtgactgaccatgcacgccttaccatcccattaaaatctaatcacccttacccgactcaacaccaatatcccatcccacagcaggctttaaaagtgttaaagcctgttatcaccaacctgttacaacatggcctcttaaagcctacaaactctccttacaactctcctattctacctgtccaaaaactggacgagtcttacaggctggtccaggatcgttgccttatcaaccaaattgtcttgcctacccatcctgtgatgccaaacccatatactctcctatcctcaatacctctctccacaacccattattctgttctgtatctcaaacatgctttctttactattcctttacaccctccatcctagcctctctttgctttcacttggactgaccctgacacccatcagcctcagcagcttacctaggctgtactgccacaaggcttcagggacagccctcattacttcagtcaagccctttctcatgattactttctttctatccatctgcttctcaccttattcaatattttgccgaccttctactttacatcccctcctatgattcttcccaacaggagaccctcctgctcctccaacatctattctcaaaaggatatcctcctccaaagcccaaatttctttatcttctgttacctatcttggcataattcctcataaaaacacacatgctcttcttgctgattgtgtctggttaatttcccaaaccccaaccccttccacaaagaaacaactcctttccttcctaggcatggttagatacttttgcttttggatagctgcttttgccatcctgactaaaccatgtaaactcacaaatggaaacctagctgacctcatagatcctggatcctttccccactcctctttccattccttaaaaacagccctagaatctgctcccacactagctctccctaactcatcccaacccttttcattaacacagccaaagtacagggctgtgcagtcgaaattcttacatgagagccaggactgcaccctgcagcctttctgtccaaacaacttgaccttactgttttaggctagccctcatgtctctgtgcagcagctgctgccgctttagtacctttagaggacctcaaaatcacaagctatgctccacttactctctacagttcccataactgtcaaaatctattttcctccttgcacttgatgcatatattttctgccctctggctcctttaactgtactcactatttgttaagtctcccacaattaccattgttcctggcccagacttcagtctggcctctcatcttattcctgatactacacctgaaccccatgactatgtctctctaatccacatggcattctccccatttccccatatttccctctttcctgttccccacccagactgcgcttggtttattgacagtagttcttccagacccaatcgccaatcaccagcaaaggcaggctatgctatagtgtcttccatctatcattgaggctatttccctgtccccttccactacctctcaacaagctaaactcattgccttaacttgagccctcattcttacaaagggactacatgtcaatattgatactgattccaagtatgccttccacatccttcacctccatgctattacatggccagaaagaggtttcctcactacacaaaggtcttcaatcattaatgcctccttaataaaaacttttcttaaagctgctctacttccaaagaagctggagtcattcactgcaagggccatcaaaagatatcagatgccattgctcagggcaatgcttatgctgataaggtagctaaagaagcaactagcattccaacttctgtccctcatggccagtttttctctttctcatcggtcactcccacctactctcccatggaaatttccacctatcaatctcttcccacacaaggcaaatgattcttggaccaaggaaaattcttctttccatcatgacaggctcatttcattctattgtcctttcaaaaccttttctatgtgggttacaagccactagcccacctcttagaacccctcatttcctttaagacatttgccctgcatttcactccatcattgactaccttcccctttttcttccgactctcctcccagccccctttcttgtttgcttatacccaaccctatgaatagcaatgaaaggtttcttgtaaacagtatgcactttctcatacaccataaaaattgaacctcccccactacccagttgccttatcagtccccattacaacctttaatggctgctgccctcactagatccctaaaagtctgggtgcaagatacctcttttggtgctccaattttgcctcacaacggtctcttcttcctctgtggctcctccgcctacatgtgtctacctattaattggacaggcacatgtacgttagttttccttatcccaaaaaaatcaatttgcaaacaggaccgaacaactttctgttcctctcatgacatcaacacttcaccacaattttcttttatttttctgattaatatgagaagacaggagtaggcctcggcttacttactgctgaaaaaggaggactctgcatatttccaaatgaagaatgttgtttttacctaaatcaatctggcctggtatatgacaacatacaaaaactcaaggatagagcccaaaacttgccaacgaggcaaataattatgctgaacccccttgggcactctctaattggatgtcctggctcctcctaattcttagtcacttaatacctgtttttctccttctcttattctgaccttgtgtcttccatttagtttctcaattcatacaaaaccacatccaggccattaccaatcattctatatgataaatgctccttctgacaaccccacaatatcaccccttaccacaaaatctttcttcagtttaatctctcccactctaggtttccacactgcccctaatcctgcttgaagcagccctgagaaacattgcccatcatctctccatacgacctccaaacatttttgccaccccaacacttcaccactattttgttttgttttttcttattaatataagaagacaggaacgtcagacctctgagcccaagcttgcttgtatacatctagatggcctgaggcaactgaagtatagccagattttagggaatcagagagactgatgaggttcaggaggatatttattaattactttggttcatcagcccagacggattaacatccaaaggactgagccctcaacaaagagttaagttagcttttaggcattttgtgggtggggggagatctgtgcaggaggaatcatactacagaagtgagaaacaaagacagttattttgttgagacatgcattacatcatttcttacttttcaaggaaaaccatgttttgcgacttgagtttatctgtctagtgaccttgcagcttcacagctatggaatcagggtcttcacaatgcctgggaagtgaggaaagataaagctcactagcgatggaaaaacaggcagttagtttttttttttttttttttttatgttctgatcttatttatttatttatttatttattgttgtgggtacatagtagtatatatatttatggggtccatgagatgttttgatacaggcatgcaatgagtaataatcacattatggagaatggggtatccaccccctcaagcatttatcctttgtgttataaacaatccagttacacacttttagttattttaaaaatgtacaattaagttattattgactatagtcaccctgttgtgctataaaatagtatgttttatacattctttctagctatttttttctgtacccattaaccattcccacctccctcccacccccactacccttccctgcctctgataaccatttttctactctctatgtccatcatacattctgattttaaaacggttttcctacatttcatacataagtcactcaagtacacagaattattattttttttttaaatttatttttttattgataattcttgggtgtttctcacagaggggtatttggcagggtcatgggacaatagtggagggaaggtcagcagataaacaagtgaacaaaggtctctggttttcctaggcagaggaccctgcggccttccgcagtgtttgtgtccctgattacttgagattagggattggtgatgactcttaacgagcatgctgccttcaagcatctgtttaacaaagcacatcttgcaccgcccttaatccatttaaccctgagtggacacagcacatgtttcagagagcacagggttgggggtaaggtcacagatcaacaggatcccaaggcagaggaatttttcttagtgtagaacaaaatgaaaagtctcccatgtctacttctttccacacagacacggcaaccatccgatttctcaatcttttccccacctttcccgcctttctattccacaaagccgccattgtcatcctggcccgttctcaatgagctgttgggtacacctcccagacggggtggtggccgggcagaggggctcctcacttcccagtaggggcggccgggcagaggcgcccctcacctcccggacggggcggctggccgggcaggggggctgatccccccccacctccctcccggagggggcggctggccgggcggggggctgacccccccacctccctcccggacggggaggctggccgggcggggggctgacacccccacctccctcccggatggggcggctggccgggcggggggccgacccccccacctccctcccggacggggcggctggccgggcagaggggctcctcacttcccagaaggggcggccgggcagaggcgcccctcacctcccagacggggcggctggccgggtggagggctgaccctcccacctccctcccggatggggcggctggccgggcagaggggctcctcacttcccagtaggggcggccgggcagaggcgcccctcacctccccgacggggcggctggccgggcggagggctgaccccctcacctccctcccagacggggcggctggccaggcggggggctgacccccccacctccctcccggacggggcggctggccaggcggggggctgacccccccacctccctcccggacggggtggctggccgggctgaggggctcctcacttcccagtaggggcggccgggcagaggcgcccctcacctcccggacggggcggctggccgggcggggggctgacccccccccacctccctcccggacggggtggctgccgggcggagacgctcctcacttcccagatggggtggctgccgggcggagaggctcctcacctctcagacggggcagctgccgggcggaggggctcctcacttctcagacggggcggccaggcagagacgctcctcacctcccagatggggtctcggccgggcagaggcgctcctcacatcccagatggggcggcagggcagaggcgctccccacatctcagacgatgggcggccgggcagagacgctcctcacttcctagatgtgatggcggctgggaagaggcgctcctcacttcctagatgggatggcggccgggcggagacgctcctcactttccagactgggcagccaggcagaggggctcctcacatcccagacgatgggcggccaggcagagacactcctcacttcccagacggggtggtggccgggcagaggctgcaatctcggcactttgggaggccaaggcaggcggctgggaggtgtaggttgtagtgagccgagatcacgccactgcactccagcctgggcaccattgagcactgagtgaacgagactccgtctgcaatcccggcacctcgggaggccgaggttggcggatcactcgcggttaggggctggagaccggcccggccaacacagcgaaaccccgtctccaccaaaaccagtcaggcgtggcggcgcgtgcctgcaatcgcaggcattcggcagactgaggcaggagaatcaggcagggaggttgcagtgagccgagatggcagcagtacagtccagcttcggccccgcatgagagggagaccggagggagagggagagggggagggggagggggagggggagggggagggggagggggagggggagggagagctagtttttaaaggactccagctctttctctttctcagggggagttgggttttcttacgtacaactgagtttctgcttacacattctttaatttcttttaattcctgttccagaagaaccacaaaagaagtgaaaatgtccagttcctgccttaattgatgacattccaccactgtgatttgttcctgccccactctgactgatcaattaaccttgtgaccttccttctcctggacaatgagtctcagaagctcccccaccaagcaccttgtaacccccgcccctgcccacaagagaaaaaccccctttgactgtagttttccactacctacccaaattctataaaactgccccacccctatctccctttgctgactctcttttcggactcagcccacttgcacccaagtgaaataaaaagccttgttgctcacacaaagtctgttggtggactgtcttgacatggacgcacatgacaggttccaccatgttttctgtgctcaagcagtctgcccaccttggcctcccaaagtgctgcaattacaggtgtgagccaccatgcctggcttgttcgttctatctatctatctatctatctatctatctatctatctatcatctatctatctatctatctacctatgtatctaaccatctttttagcagagatgtggtctcactatgttgcccagggtctgctcatatatatttcttttttaacattattgttattttgtctcactgtatcacccaagctggagtgcagtggtgggatctcagctcactgcaacctctgcctccctgttctaagcaattctcccacctcagcctcccaagtagctgggactacaggtgcaccccccgccccccagatgatttttgcatttttagtacagacgaggtttctccatgttggccaagctggtctggaactcctgacctcaaatgatccactcatctcggcctcccaatgtagtgggattacaggcatgagccaccatctccatcctggtcatttttttttttttccttgagacagagtcttgttctgtcaccaggctggaattcagtggtgtcatcttggctcactgcaacctctgccccctgggttcaagtgattctcctgcctcagcctcccaagtagctggtattacaggcacatgccaccacacccagctaatttttgtatttttagtagagatggggtatcaccatgttggccaggatggtctcgatctcctgacgtcgtgatccacctgccttggcttcccaaagtgttgggattacaggcgtgagccactgcacctggcctccagtcatatcatttatgtgttgatttttttcagtttgtgtttcagtccagatgcgtagtgatagtaccgggattgagaacaaaaatgttgaaacagatcaatctcaggaacctgtttttttttttggttggttggttgtttttaggggcacaagcgccactgagtgaagtgctcctaatctctgttggttttgaatattgtagaaagcattacagtatttaattttgtgcactaaagattttttctagttctagaatacagataaatctagatgtatgattcttaatcaatcacaagaggctcaataagcctttttcctcattctacttctttcttgaaggggagggccttgatttgcatttgctgcctacagagagcaatttgtccatatttttttctcttctttttcttatcgggagggaaatgagcctgagaaagctgcaggaccatgagttgttagaagattacttccaatgagaggaaaggaagtgtgtgcgacaacacattcagagagaaatctggggaggtagcagagcaggaagcaccagtcatctgtctcccctcctaggcaaaagggaggctggcagaatctgtctgatggagcgatttgggaacactggagtctatgggaggcctgctgctgccagggggaagcctggaagatacactgtgatcaatgccagttcaagttagctttgtttcccaaccccacactttctatgcccccctcaggccagaatcacagtggtggaaaggcttctaaggagaggtatgtgggatggtgctcctacaacaagtcaggatctttaagctaagcctgttttatttctggtctcaagttcaccagaataaaaaaggtattccttgacttagcaatgaatgatatcatggctttagtttattttctgctcacaggtttgagccataaaaaataatttttcttgatatgcaatacatgataactatgtatgtcagaacatgcttctattagtgtactcttgaggatatagtttaaatggcaaataaaattttgcatatatggaagtttctttttatgttactaacagtacaaatatctatcaatacatttacctcttatgtctctactctgaatataaagagcatgataattagatctggatatagatgtttgtaagtagatacaggcaagcataaaattatatgggtttgtctatgtaaatatttatgtatacaaaatatgttcaagagacatcctcctccagccaaaactgatgttgaggcatagacttacattcaaatatatggttgtatagcatctcaggctggaacccagctagctatacaataacattgagggacacagcctgagaagtaagttccagtactgttatgtaaggttttatggaaaacttggaatctgaaggccctgcttttttcttttcactgcatgcctgttatttatatccatcactgggggccttccttgatgcttcttctttcccaaactagctaattggctgattatatttacctgggctgagctaatttggctgattaaaatcacctgagcttagctaattggcttattgaattcacctggtctggatgagcaggcaaggaaaatgaactttgatctactttccttctgaggcttttttacctggcataagcacaaatggactttacctagatacacctatgtgaaccattctgggtgtatatgtttcgctatccacatatcttatatctataaatacatgtacagaactaaatgaagctaggtcagaggtcatttttatttgcattctttccagaccaggtgaatcaagtcagcctaataggctgattgctcagtcgtgatttaccaaatccaagctacatatcacatcacattattcttataaatgtgtaaatgttcttgttatctggcacccgagtgtttttaattcagggtctaatcaaacttgctcagtggaatcctaaccacacagctaggacaagccagaagtgcctgacaccagggactctagcctttctcacaaagatttagcctggagaataagagccaccactaacacttcagcacatgttcgctatcacttggttgaaatatggccagggtccagctttgcatgacaatgaatgactcccttggccttagtgcatttttatttcctagaagaaagaaactagaaacaatgctttcttcatgtatgttaaatgcagcaggttgtatttaagaacaacctcccgtatgtgtgattctggatatagtttataaggcagttaagattatacatgtataaaagtcttttttataccattattagaatcaatacctatcaatatttccactttccacatttttttctgtatgaatatacatacaaagctaaatatgtttgcatatagatatacataggtagaaaggtaaacaaaaacccatacagaattatgtatgtttatgtgaacatttatgtatacaaagcatgttctgaaaagacattttaaatgctctagtatatattaagaacacaaatgtatagtaacttcggtactctgtggcacaataacatctcataatgaaacagagccaagcaatgttgtttgtataagtgtaaacaaagcttcaggttcagggaataagtctagaaagtaagctgacagtacagctatgtaatgctatatttccaggctagcatttcaggctattgctttgtttctcactgtatcaacatgctatttacattcactatgttaggcctgacttgatgaatctgcagtccctatttagacaattgcataattggatccacctgagtcgagctaactagcttattaaagtcacctggactgagctaattggctgactggattcaccagagctgagctcattgactgaatggattcactgtttccaaatagaatgtgtagaaaaatgacttctgatttaattttattttggggctgttttacaaaaaagtgctcacagatcaacattatatagacatatttacataaccctgtgtgtttgtatatgtttatctatctatatatgtcatatttagatcaaaatctacagagaaatgtgtccaataaaactaacattttttttccagtattgaagtaaatgctcaagttacagcccttggcttttattctcttacccaaaaagtcactacttcagcaaagaaaacaaaaatacaaggattgattcctgtgtcacacgtttgaaaaagattctttaaatttatgaaagctttaaagacaattattcagcactttcacatttgggtgagggcctttaagctgaggctattttatttctggtcctatgtttaccagaaagaaaatggtcacccttgacctggcaatgaatgtctttcataaccttagcatatttttattgttcagaagtgagcaacaagaaatgatcctttcttgttaaaagcagaaagatgtatgtgggagcatagttccatttttgtactattttttgaatagtttatggggaagttaagtctatacatatataaaagcatctttttatgtcactatcattaccaatatcaatcaatatttccactttatacatcattattcttatttttttattgagacagggtctcactctgtcaccaaggctggagagcagtggtgccatgtaggttcactgcaacctctgtcccctgagctcaagcaatcctcccacctcagcctcccaagtagctgggactacaagcacataccactacacctggctctttaaaactcgagctcaagcaatccacccacctcaacctcctgaagtgctaaaattacaggtgtgaaccaccgcacctggctatacatcattatgttttataaatatagatacaaagatggatgcatctgaatatagacatacatagataaacatacacacacatataggattatatgactacatatgtgtaaatattaatgtatacacattatgttggccaaaagacattttcaataccctagtatatattatagataaagatgtagaattacttctctactctaacacaatagtattccagaatgaaacatagacatacgatgttgtttgtttaaatgtaaacaaagcttctcctgcatgagaaagatttgggaagatcacagtacacgaactaatagtttatgttcagattagcattttatggccctgcttttattttcaatctatgcatgcactactcccatcaaccattgtaactctgccttgagaaattcactgttgatattttgataattgactgatgggtctaacttctttgagctaactggctgattggaatcacctggcctgagctaattggctgattttattcacctgggctgagctaattggctaattggagaacctgggctgagctaattgaatgattgaaatcaccggggctgacctaatcagctgcatcaattaacctgtcttgagggaaatgagtagtaaaatgacatcttttattttgaggcttctttgcaagacacactcacaaatggaaattacatagacatatttgcataaccctgtgatttctatgtgttaattcatctatgtattttatatctgtatctaaatctacaaaaaaatctatccaaagaaaacttaatttcctttcagtgtagcaggctaactttgagtcatagactccaatttttttttctctaccttaaaaagttacttctttagccaacaaaacaaaaaaatccccaaattatcatgctatgtcatatattcatacaaaagagcccctgaagtttaaagataattatttctggaagtatatttctgggctgagctggttggctgattgtattcacgtgtgttgagaagcaagggtagggtaatgacctctgacatacttttattttttttccaagacatactcataaatggtcattgaataaacatatttatataaccctgcatgttatatatatatatataaaacagaagaaagtgtctagagaaaactaaaattcactgtcagtacagcaatgtatcttcaagtcacagacctcaactattcatttcctaccaaataaagttgcttctccagccaacaaaatgcaatacaataatttatttttttgtcccatgttcaaaaaaaagaattacctcaattggtggaagctttaaataaacattttcagcattcgcacatttgggttagggcttttcagcagaggctaatttaattttggttctgtgttcactagaataaaaagggttatccttgatttggcatgaatgactctcatggccttagtgaatttttatctcccagaagtcagcaacaaggaccaatgcttattttgtataagttaaatgcagatggatggacgttatagcatgcctccatttgtgtactactctagatagagtttattggtcagaacgctttatacatctatggaattatttttatatatcagtatcagtatcaatacctatcaaccctttcaccttctgcatctttactttttatgaataaaaatacaaaaatgaatatatctggatatagatatacacaggtagatgtacatctatgtaaatatttagatagataagtacatctatgtaaatatttaggtgtacactggatgttcacaaaaaggcattttcaataccttagtatataatcaggatgcagatacggacttattaccctactgtatgccacaatacaaacccaggattgtacattgccgtacaatgttgtctacataaacacaaacaaagcttcactttcaaaggtgaggtctttgaagtaagctgacagcatagcaatttaatgctttatgaccagattagcatttcaggaacctgcctaccttctcagtgtaggaatgtgctgtcacgtccactgttttgggcctgacttgatgaatctgcagtcgctatttagataactgtttgattgaatccaagtttgctgaactaattggctgattctttggcctgggccctgcctgcagaagtcattgtgacatatctatggtcccatcagagatgcgactgtcctcttatgcctggaccctgtccacagtgaagatttcaacatatggcttggctcagcacctaagtaataagactctcctattgtgcttgggccctgcctgcaggggttattatgacataaagctgagcccagctcctatgttatgtgactctcttctttttcctgagcccaacctacagggggaatgtttatatatctctgggctagttaaacctatctctctgccagttaaacagttttcttctgttcacgtctaatggaaggctataaatggcattacttagtgaatggaatagctttctaaaagctcaggtgctactgagaagctgaggcttgcaggatttcagcacacttaattctaatcaagtcacaggactcaacctaggaagaagcagttggggaaaagaacctgggcgatgtgactctccatctgggcactcccattagggagtattgtagcatatctttgagcccatcgactgtttgatgtgactctcctgtctcacctgggctttgcccatgggcaagattgtaacatatgtattgggccataacccaggtgttgtgactcttttctcctgcctgacaactgctcccagagtggattgtggcatatggttggcctcaataccaagttggtgttgctcttttgccttggccctgcactcaggagacactgtgccatttcattgggctcagcaccgaggtgatgtgaatctcctgccttgaatctgttcgggggggacattgtgacatatctcagggctcatcaacttacaacatatttgagatgcctcttttatctgatgtgggctttgcccattaaagtaactgtgacatatctctgggcccagcacacaggtcatttaacacttctgcgttggccctgtccacatgttcattgtgatataactctgggcccatgccctaggcaatgtcactctcctcttttgcctgagccctctccttagtggggattgtgacgtattgcttctcccagaacctaggcgatggaacttcctctcatgcccgggccctgcctatgtgagtgattgaatagatagctagacgcagcctctatattatgccactctcttcttcctgagctctacccacaaaggtattgtaacatctctaagcccctctcctaggtgatttgatgcttctttctgaaccctttcctcaggggctgttgtgacctattactaaacacagcacctaggtgatctgacttttctacactgcttgggttctgcccacaatatagattttaatgtatagctcagagcagcacctaggtgatgttactctcctatcctgcctgatccctggatacattgtgtattgtgacatatcactgggtccaacagttaggtgatgtgaccctcctgcatgggccctgacaccaggagtattatgggatatctttgattcatcaccttggtgatgtgaccttcctcttctgcctgggacatgctaaaaacggggattgtgacacatccctgtaccagcacctaggcgatgtgaccgttcttttgcccgggccccatatactttgagtattttaacatattgctgggctcaacatccatgggatagtacactcctgcctgggccttgcccacagggagacttgtgacatatctctgcatgcatcacctagatgttgtgactcttcttttctacctgcaccctgccaacaggaaggattgtgacatatcgctgggcttagcaactaggtaatgtgtctctcctgcatggccttttccacaggggtcattgtgacctatcgctgggcccagcacccaggtaatgtgattctttttgcctgtgtcctgctcacagagtaaattgggacatatcactgtgcccaacacccaggtgatatgactctgctgcttgtgccctgctttcaggagaagattgtgacatatctttggccaagcacccaggtgttgtggcttttttttcctgtctgcaccctgcccacagtgaaaattgtgacatgtcactggaccaacactcaggggatttgatgtcccttctcactctctatgcacaggtggtgttgtgacatatagtttggccaagtttacaggtgtgatgattactctcatactttgaaccagctggtaggagagatactgtcttttgtagcttggcttagcaaaacagtaagagtctgggttatttcgttttacaaaaatcacaggggattatcatgctcttgcctatcacataaagcccttgggtggtacagagtgtcataaaggggccccagcacaaagttgagattgtgtctctcatatgcaaactttgacaacagttaggatggtcatcgtcacaagcggacagaggccactcgtgaggtcctaagtctcatgaaaagatgcagtccacggttagaattgtgacagtcgcatgcaaatatccagatagaattgggatggtgactcatttctaaactaagcttataggttcattgagcaccctcacatctggacccagccaattggagagatgttgatgtgggcttatggccacaggtaagatcatgggcccataccagcctgaaggtatcagagcagatcgtgactctcacacataccataaaaagccctcaactggtacagagagtatcctaacgtgactcagcacacaagtgagatcgtgtctgctgtacacatgcccagatgacagtaaagattgtcatccattaacactaacacagcccattgctgaggtcctgaatctcacacccagaagcagttgaaagttggaaaattgactctcatatgtgaatccggtccacaggtgggttggtgactctcagaccaagactcagcactctcgtgaggttgtgactccgctaaggagacaggctgcgggacggattgaggctttcacgcgtggctccggtccactgttgagactgtgaatcacgtacttagactcaacatacaggaagtgtttcctctcatacctgtaattgagaaatgtgcaggattgttaatctcatccctggcctttcatgcaggtgtgattgtgccctcaaaaggcattgtgaaatattggtgggcccagctcaaaggtgatatgaaatatgcctctccagcatttgagttattttacttttctgtgagagcccagtccacagatgggattgtgacattgctagacccaacaactaggtaatgtgactctattctcctgcattggcattgtccaaagaaggcaaataacacattacttgtcttcgcactcaggtgatgactcttctcctgccttggcactgtgcacagggggcattgtgacatatcactgggctctacacccaggttatgtaacttccatgcctggtccctgagcatagtggccattgtgacatatttcttgctctaaaacccaggggaaattactcttttgccttgctcctacctgcagagggcattgtgacacaactctgtgagtgatgtgacccttccaaaatgggattatggctgagcacagtggctcatgcctgtaatcccagcactttgtgaggctgagtcaggtagatcacctgaggtcaggagctcaagaccagcctggccaaaatggtgaaactctgtctctactgcaaatacaaaaattagctgggtgtggtggcacatgcctgtaatcccagctgcttgggaggctgaggcaggagaatcacttgagcctgggaggcaaaggttgcagtgagctgagatcatgccattgcactctagcctgggtaacaagagtgaaactctgtctcagaaaaacaaaaaacaaaacaaaacaaaaaacaaagtgggattatgacttatgactgatcccagcacctagctgatttgacttttcttttttttccaggttctgcctgcagggaagattgtgacatattgctggaaacaacaccaacataatgttgctcttttgcctgggacctgccctcaaaaggcattgtgatatactggtgggccaagctcgaaggtgatgtgagtatcctgcttcgagccttctcacagagggctttgtgacatatctctgggctaattaactgtttgatgtgactttcttctctgaccttggctttgcccatagggcagagtatgataaacctctgggcccagaacctaggtgatgtgactcttctctcttgcctcaaccacgcccacaagaaggagagtaacatcactgggcccagcacacaggtaatgtgatccttctgcctggtttccccataggagacatactcctggacccatctcctagttgatgttactctccttttctgcctgtgccctgtacacagtgaatattgtgacatatcacttgactgagcacctaaatgtgtgactcttttcatatgcctgggccctgctcactaaagtgatggtgacacatagctgaaaccagcctctaagttatgcaactttccacttctatttgagccctatgctcacggggcattgtgacacacgtttagtttttctacctaggtgatgtgagccttctatctgaactcccccgccaccaaggggtaatgtgacaatttgcttgacccagtactaggtgatgtgactcttccctactgcttggcctcttcccacaggaggaattgtgatgtatcactgggcccagcatgcaggtaatgtgactctcctgcacaggccctgcccacaggggtgattgtggcagattgctgatcccagctcccatgtgatgtgctctcctccactgcttcggctctgcttaaaaagggaatgtgatgtatctcttggtacagcatcgaggtgatgtctctctccttttctgcctgggccctgcatactttgtgtagtgtagcatatggctgagtctaagacctacttggtgtgactctcctgcatgtgtcctgcccacaaggtattgtgacatatattttcattgattacccaagtaatgtgactctcatcttctgtttgggccctgtcagtagacaggattgtgacatgtcactggacccagtatcttgacactgtcactttccttttttgcctgagcctgtcatattttgggcattgtgacttagcactgggcctgacatctgggggatgagaggctgctgcataggccgtgcctacagtgcaccttgtgacatatctctgcattcatcacctaaaacatttgagtcttctttttgtcctgcaccctgctcacaaaaaagactgtgacatattgcggggcccagcaaccagatgatgtgttcttactgcctggaccttgcccatagagagcattgtgacatattgtttggcccagcattcaggtgacatgactctgctgcctgtgacttggttccaagatagaattataacatgccactggccaagaaccaagatgatttgacccttctacctggtccttgccctccggaagattgtaacatagccttggcttattacccaggtgatgtgactctcctgcttgctccctacccacaggtgatattgtgacatatatcttggcctagcttacaaacgggatgatgactctcatattttgaaccagccaatatcagagatattgtctcccatagctaggattagagaaacaatttgggttctgtgctttcttaatgtatgaatgtcataaagcattaaccactctctaacatgccatataaagccttcaggtggtacagagggtgccatcacaaggtgcagtgcacagatgagattgtgtttcttgtatgcacattctgccaactgttaggattatcactctcatacatggaaagaaccaactggtaagattcttaattgctcatgtggatgcaagtcacagttggaattgtgactgtgatatgtgaacatccggcaacaattaggatggtgaatcatttctaaacccacatcataggcaggtaagaactctcctatctggacacagccaattagagacatgttgactttcattcctggacttaaggccacaaatactgtagggaccagccccacagggtcagtgggtctctccctgtgtgtggcgatgagagagtgtagaaataaagacaccagacaaagaaacaagagaaaaggcagctgggcccgggggaccactaccaccgatgcgcggagaccggtagtggccccgaatgtcgggctgcgctgttatttattggatacaaggcagaaggggcagggtaaagaatgtgagtcacctccaatgataggtaaggtcacgtgggtcatgtgtccactggacagggggcccttccctgcctggcagctgaggcagagagggagaggagacaaagagaaagacagcttacgccattatttctgcatatcagggactattagtactttcactaattgactactgctatctggaaggcagagccaggtgtacaggatggaacatgaaggcagactaggagtgtgaccactgaagcacagcatcacagggagatggttaggcctccggataactgcgggtgagcctgactgatgtcaggccctccacaagaggtggaggagcagagtcttctctaaactcccctggggaaagggagaccgccccccccccccaccctttcccagtctgctaagtagcgggtgttgtttcttgacatcttttgctaccgctggatcatgatccgcttggtaacgggcgtcttcccagacgctggcatcaccgctagaccaaggagccctctggtggccctgtccaggcataacagaaggctcgcacacttgtcttctggtcacacctcactatgtcccctcagctcctatctctgtatagcctggtttttcctaggctatgattattgagtgaggattatcataatattggaataaaaagtaattgctaccaactaatgattaatgatactcatatataatcatatctaagatctatatctggtataacaattcttgttttatattttattatactggaacagcccatgtcctctgtctcttgcctcggtgcctgggtggcttgccacccacatctcccccctttttattaactagaatcgccatcgccatcattgcttgtcgttgacttcagacttggtttcggactccttggaggcatctgcagactaaaaggagacaacataagcataccaatattaataatgccagtaacaacaatgatcctctgacaggtttgagccatttgaagggattaaaatcagataattatttagctatgccttgaaaaatgtctgagccaggaacagtggataaatgggcttgtgaagcctcaaagatttgctctttaagttgtgaaatatccaaggttatgttgtcatcccaggcttttaaatgtcttgagaccttttccagctatgttgatcttgattataagcataaggcgttatgcaataatcagaagtattccaatcacactgtaattgcatacggtgttccaaattcataactctatctcccagccaggttacactttggcagagatcattaatctgattagctaatttttgatcaatttgcacctgagaattccaaagtctggaggggtttttctgccatgcttcaacatagtgagcagtttgaacagagttgtggatggcaactccagcagttgctgctgttgcagtaaccgcaattagtcctgcaaggactgcaataagagtaaaaataaatctctttgttcttttaagaatgcctttaagaacttcattgactatgtgaatagagggggaagactcccatggatgacataaagaaactggtatccataccccctccctagcccttatcaagagaatactggtagtgggattaaaagttgcatcaatgcaagtgaacagcttacagttatgacattctgtagtttgtgcatcaggcataataattatatttccaaccaacagcatgtaagagggtttgacacagctcctaataggtatcacccattcagaaataagggtgatgttgaaatgtggatgttttggttttagtacgaaggagttgataggtagtgttccatatccttattcctgacaaaactgcagctaatttccatagttcaggatgttgtggggtaacaaagggatgaatcatttttggcctaggaggagcaatgcctgtgtccatccatttaaatgggtaaggagacaccattgtctcattgtgtaagactgccatccatgctgtatataatctaaggaataaactccgaacataaggtattttttgctggagcaatcttgccaataatgtccttttggagcctaatcaataacaatacccgtggctagagttttgagcacaacagccttgggagcattacaatcatcccataaaattgaagtcactataaaaggtccctttgtaggtttctttggacagtctggcagtccttttgttttattagttttggtagtgagaggaattctccatgcctcatgtggggtacgtttgacagtgagaagttgaaaagagttagtactgaacacattatgtacttgataagaatcatttgtaaaggacggtacggtccacatccaattctggtaagaataagctaaacagccaggcgacttcccaatacgtagtggtggatatttatagccaattgacagattaaagtgcataccttcttcttccggttgagctggaaaccgatcatcattagggatcggcatgaatgcactattattagtgtaaacttctactggggagtccatccaggagacagaccgaattagagggggaaaaggaacatatgcccaataagtataattttgagttgccccgaccggtggtatacttaccgctgcactgactaccataaaggcagccacaattatattaccggtcgtttgggggattctttttctgttaagaatttttctgtttgatgagataacatctttatttgaccccaagtaggtggagttgaacgagaggtgttgtaggtcacacggcgagattttgtctcaatgtggatgtcacgaagggtatgtgtcaggcggtgaaagttgctcttttgtttccgatgggtctttgccttttgtttctgggagcgtttcatctttggagttatggtgcagttttaattgtcgggaggggacccacacaggttgtagtccttttcctggggaaacacaagcaaaacccctaccccaagttatgaccgtgcctaattcccgtgtgttagtttttacgtccttccaccatacccgcattcctttttgtggatcaaatttatttacagtgaaatgttgttctgcggctgtgaaaggttgatttcttgttaagtttaagaaatttagtgtgaaaagagccagatttaatttggcatgaggagtaacagcatctccctttaatttagtatcctgtttacgcagttgatctttgagtgttttcttggctcgttcaaccaaggcctgtcctcgagagttataggggatgcccgttgtgtgagcaattgcccatgtctgaggaagctttttaaaggcagcactagtgtagccggggccgttatcagtttttagtttctcaggacagcccataaccgagaaacaggaaagcatatgtcgtttaccatgagctgtactttctcccgtttgacaagtggcccaaataaaatgagaaaaggtatcaatagttacatgtataaaagaaagcttgccaaaaggaggataatgagtcacatccatttgccgaagagcattctgtgaaagtcctgtagggttaactcctgaagacagtggctgtaaaattaacacttgacaagtaggacagtgacgcacaataattttagcttgtttccatgtaagggggaacttgtttcggagtcccgcagcattgacatgagttaaagcatgaaaattttctgcatctgtaaaaatgggagtaactagtgtatcagctctggcatttgctgccgagaggggtccggggaggggtgtgtgggcccgaatgtgagtaatgtagaaaggagaagaccttgctctgagcacagactgaaacttttgaaaaagaaaggttatcatcaggcataaattggattaaggcagtttcaatgttgtgagcaacatgtactacatacgctgagtcggagacaatgttaactggttcaggaaattcttcaaggacagccctaacagcaagcagctcagctcgttgtgctgaaatagcccctgtgttaagaacacgttctctgggtcctgtatatgctgctcggccgttagaggaagcatcagtgaaaacagtgacagcttcaggtaatggggtgtttctagtaacgttaggtaaaatccaagacgtgagtttaaggaactgaaataattttacattaggacagtgattatcaattatacccgggaaacctgccaaatgcacttgccaagcgatgcaagtagcaaaagcctgttgaacttgtaatcgggtaaggggaacaatgattttttggggctctgttcccgaaagacgaaggagatgagaacgagcctgaccaattaaggtagaaatttgatctagataaatagttagcatacgtaaagagctgtgtgggagaaaacaccattcaattaaattatgtccctgaataatgagtcctgttggtgaatgttcagtaggaaaaattagtatttcaaaaggtaaatgtggattcactctggtaacctgagactgttgaatgcatttttctataagtcgtaattcagaatccgcctcaggagtcaaagaccttttactgcgtaaatccggattgccccgtaatgttgcaaaaagattagacacagcataagtaggaatgcctagggagggacgaatccaattaatatctccaagtaatttttggaaatcatttagagtttttaaagagtctcgtctgagttgaactttttgaggcttaatgaccttatcctctagctgcatccctaaatagtgataaggagatgaagtctgaattttttctggggcgataaccaagccagctgctgtgactgcttgttgtaaagcagaaaaacaagatattaatacagagcgtgaaggtgctgcacaaagaatatcatctgtgtaatgaataatataacattggggaaatttatctctaactggctttaatatgcatcccacataatattgacaaatagtggggctattgagcataccttgaggtaggactttccaatggtaacgtgctgcaggagcaacgttgttaagggttggaacagtgaaagcaaatttttcaaagtcctgaggagccagaggaacggtaaaaaagcaatctttaaggtcaatgatgataagtggccaatactcaggaatcatagtgggggagggcaaaccgggttgtaatgtccccataggctgaaggacagcatttaccgccctaagatcagtaagcattctccacttaccagatttcttttggataacaaaaacaggtgaattccaaggagaaaaagaaggttcaatgtgtcccaattttaactgtgcaagaaccaaaatatgaagtgcctccagcttattttttgggagtggccactgatctacccagacaggtttttgagttttccaggtcaaagggatgggttctggaggcttgatagtgactgcttctaaaaagaataaccaagtcctgtagagtctgctttaggagtaggtatgataggctcagtgatgccttgtgctgattttcctaaacccagaccttgaacaaatcccattttggtcatcatatctttactctgctggctgtaattgcctttaggaaaagtaatctgagccccccattgataaaaaagatctcttcctcacagattgacaggaatgggtgtaatgagggggcgaatagttccaatctgtccttcagggcctgtgcaatgtaaaattatggagctttcatatacctgtgaagcctgaccaacacccactaatgctgtggaggcatgctcctttggccagtgtcggggccattgatgtaaagcgataatggaaacatcagcgcccgtgtcaatcattccctcaaacttctttccctgaatatgcatggagcacacaggacgagtgtcagaaattttgctggcccagtaggctgctttaccttgataatctgtgctaccagaacctccctttcttgtactagaactagatcccaaaggaatgtaaggaagtatcaggagttgagcaatgtggtccccagctgctgcattccaagggactgcagagctaatgacaatacgaatttcacctgaatagtcagaatcaattacaccagtatgtacttgaacaccttttaaatttaaacttgaacgtcccactagcaaaccgacactgccagtcggcaagggaccaaaaacacctgtaggaacagcaataggtggctctccaggcaacaaagaaatatctctggtacaacagagatctactgctgctgagcctgtggtggtgggggacaagcattgtactgagattggtgttggggctgaggcattagatcctgtggcacaaattgctgaagtgggaattggggtggaggttgaatggattgaactgggaaggctcccgtttggctggacgccaggggctgagagttgaggaatgccccactgtttagaggggcctggggccagcccctcatcctgtttccccgatttttaaaaggccgtaaaggattgccatcaatatcaaatctggaatggcattgagatgcccagtgaagaccctttcggcatcgtgagcatacagtagaaggtggggcatcttgttgctgaaaagttttttgttgttgttggtggtgatgtaaaggacagcgacctgcatgccgagggcaatttctttttgcatgtcccttctggccgcatatgaagcattggccagaggattgtccaggcatttgaatagaggccatagcttgtgccataatcattgctgtatggagagttcctcccaccccttcacaggctttaatgtaggaggtgagtatatcaccacccggtggaattttacctttgacggggcgaatagccgcctgacaatctggatttgcttgttcataggccataagttctacagcaagtctttggccatggctatcaggaatagccttttctgctgcgtcttgaagacaagcaataaagtctgggtagggctcatgttgtccctgtctgacggctgtgaaagatgggcatactttaccatcatcttgaattttgtcccaagcatctaagtaacattttcgcagttgttcgataacctcatcatttagtatagtttggtgtcggattgcagcccattgactcattcccagtaactggtcagccgtaacgttaacagggggattagagccctgattaagacgaatgcgttcctggacagcatcaacccaccaagtcctgaattgtaaatattgggatttagataagactgattttgccaaaatttcccaatcatagggtaccaaacgtttatcctctgctagggcttttaatgtggaatggacaaaaggagagttggtgccatattgtttcactgattccttaaaatctttgaggaatttaaaagaaaaactttgccacgtagcaggacgtagctgaacctggcctggatggatggggtcaggctgaattaccacctgaacagcgggaatgcccggtattggctgtgccccaggagccggcaattgcagagcctgattatttacccgagcagcctgattctcaggctgaggggcttgattatcagcctcttgatcttgttgagctgcggggtcagccgcctgctgggcaggatcaacaacaggctgtgggtggttttgtactgctggggtggcaggtactgggggttgtaaaattacaggaaattgccaagcttcaggatccccatattcccttgcctgaactatagccctcataagcggagtgtcatcttcagggatgtatgtaatttgttgcttatgagcggcaatggtagtattggcaacagcagttgcgactggaccaggagcagaaaaagaggtagaattttgaatagaaggagagtcgaaaaactgaaagccagggtgagagcagactacctgctgagcaggtctttcatgggcctgaaaaccaggctgccacggcaagtgtgaaccaggcttcaagggagcctgtgactctacccgagtctgatttgtaggaaaggaaccaggcttcaagggagcctgtgactctaagtgagtgcgatttgtaggaagtggaccaggcttcaagggagcctgtgactgtaactgagtccgattaggaggaaaagaaccaggcttcaagggagcctgtgactctaactgagtccgatttgcagggaatgaaccagccttcaagggagcctgtgactctaagtgagtcagattaggagaaataggattgagggcctcattaccgggccgagaattggaagcctcttttccaagctgttcatatagcagagcctctgtaccgggctgcatagaaacgtaatttgtagactcgtttacaggctgcctggtctcatctgctatttgcacggcggcagtgttgaaagagtgaggagagacaggagggtctggccgcaatggctgttgatatgtttcagctgagttttgctgattgggggagataagtacatttaggtcagttaaaagatcatcataaagcggcaatgggggtgcagtagcctctggcgtaggtggtggtgtcgcaggcatgtcagagtggaagtcctcctttgaaattacgttctcaacttgtgcggtatcctcaggggaaagagagctgagagcttcctcgacctcctcagaggagaggaaagagggatcagtctccatattgtcctcctgagtctgtaaggagtctaagacagagcgaaccgaagcccagattgaccaaatggtgggtgggataaaatgtccccctttatgagcaattttgaattgtttgccaatctcatcccaatctttaagttctaaagttccctcagtcggaaaccaagggcaaagaagatctacaacctcaaatagttcaattaacttttcagtagaaactttaacacctccttctttaagaagagtttttataaaatttaaataagccgaatactttgtactggcctgtcccatggggtccccggaaaactctgagtgttcaagcttaccaccaagtttattgactgcaatcttcaggaatctctcgttgaactcctccgctgatcctgcactcagggtgcaacttcacacagcgagggagagccccacgtcggagagccagatgtagggaccagccccacagggtcagtgggtctctccctgtgtgcggtgatgagagagtgtagaaataaagacacaagacaaagaaacaagagaaaaagcagctgggcccgggggaccactaccaccaatgcgcggagaccagtagtggccccgaatgtcaggctgcgctgttatttattggatacaaggcagaaggggcagggtaaagaatgtgagtcacctccagtgataggtaaggtcacgtgggtcacatgtccactggacagggggcccttccctgcctggcagctgaggcagagagggagaggagacaaagagaaagacagcttatgccattatttctgcatatcagggactattagtactttcactaattgactactgctatctggaaggcagagccaggtgtacaggatggaacatgaaggtggactaggagtgtgaccactgaagcacagcatcacagggagacaggcctctggataaccgcgggtgagccggactgatgtcaggccctccacaagaggtggaggagcagagtcttctctaaactcccctggggaaagggagacccccccccccaccccccaccactttcccggtctgctaagtagcgggtgttgtttcttgacaccttttgctaccgctggaccatgatcagcttggtaacgggcatcttcccagaagctggcgtcaccgctagaccaaggagccctctggtggccctgtccgggcataacagaaggctcgcacacttgtcttctggtcacacctcactatgtcccctcagctcctatctctgtatagcctggtttttcctaggctatgattattgagtgaggattatcataatattggaataaaaagtaattgctaccaactaatgattaatgatactcatatataatcatatctaagatctatatctggtataacaattcttgttttatattttattacactggaacagctcgtgtcctctgtctcttgcctcagtgcctgggtggcttgccacccacaaatacaattatgggtttctaccagcaagaaaatctcagagaaaatagagattctcatgcatattttatgaagccctcacatggtatagagagtatcctataagggcccaacacacaagggaaattgtgacacttgtatgcacaagcagcctacagtattaatagccattctcgtacatgaacaccgctcactgtagaggttctgaatctaaaacccagaggcagtcaaaagttaaaaaattgtcccccatatgtgaatccagtcacaggtattggtgactctcaggccaatattcagcacacctttaagactgtgactttactaaaaagacacagtaagcaggaaggattgaggctttcatgcatggattaagtacatgattgagattgggactcatgtactttgacccaacatacaaagtgttgactctcgtacctggaacaaagacacacgtgagattgtcaatctcatctctaaatcatcctgcaggtgtgattgtaacatacaccttttcccagcacctgagtgattggatcctcctacctcagcctagtccccagaaaaaaattttgacatattgctggactgagcacctagatgatgtgactctattttcttggagctgcacacagtgggtagtttgacatattgctgggctgtgaattcaggtgatgtgagtcacctctccacattccacagggggcattgtgacatatcacttggcctcacatccaggttatatgactcctgcccgcaccctacacacatgagccatttgtgacataatggccagcacccaggtaatgtaactcttttgcctgggccctgtttacataagacttttggtcacatctctgcacccatcaaccatgtgatctgactctcttcttttgccttatttctgctcacaggaaaaattatggcatatcattgggcccagcatcagtgattatgacatatcactgggctcagcccagcctagctgatgtggctcttctctctctctctctctctctttcactctctctcttttagattctgaccacaaaagagattgtgacacattgctgagtccaacatcaagatgatgttatacttttaacttggccctgccctcagaaagcattgtgacatatttctgatgccagcattaagattatgtcagcctcctgcttgctcctttccaaaaggacgcattgtgacatatctctgggctaattaacaatttgatgtgagtcttctctcttactttggtttttctcataggagaaattgtgacatgtctctgaacccagcacctcggtgatgtcactgttctcttttttcttaattatgtccacaaaagaaagagtgacttgtcacagagcccaggacacaggtgatgtgattattcaatctggtccctgcccgaggggtcactgtgacatatcttagggccatcaccaaataatgtggatctcctgttcttcctgggacttatccacagtgaagattgtaacacattgcttgggccagtgtttatatgatatgactttcctcttatcctgctggctagggtaattggaacatttaggtggcccagcctctagtttatgtaaatctcctttttttcctgagcctaacccacaggggggcatttcaatgtatttctgggcttttcacctaggtgatgtgactttgctgcctgggcccttccctcaggagctattgtgacgtattgccagaacaagcacctagctgatgtgtctctccactacagacagtgtcatcacagggccaatcaaaaatatgagattgtgtttctcatatgcatacttaaccaagtgttataattgtcactcttaaacatggaaagaatccactggtgctgtccttaatctcacacgtgggtgtagtccacagttggaatagtgactgtcatatttgactatccagctaaagttgggattgttactcatttctaaacccagatcataggcaggtgaagactctcctatcttgacccagccaatgggaaaggtgttgactcttataactttgcttagtgccacaggttcaaacatgagtccatacgagtaaaaaggtctcagagagaatttgcatctctcatgcttatcatataaagttctcagatgatacagagagtgtcctaacaggacccagcatacaggtgacattgtgccacttttatgcacatccacccaacaggaaagattaaacacagagcccaggcaaaaacctcacacatgaacccagccccctgttgaggtttggaatctcaaatccagacagagtacgaagttagaaaattgactctcatatgtagatgtcatccacaggtgtgttaatgcctgtcagatcaacattcaacacacctgtgagcctgtgtctccactaaaataacacactctgcacaaaaaacctaggctccaatgcgcaactgcacaccaccattgagattttgactcatgtacttagaatcaacatacgggtggtatttactctcatattgaaaaccaggatgtgtccaggagtgttaatctcacctgtgaaccttttttgcaagtgtgattgtgacctatgcctctgcccatcatctatttgagtcttctgcctgggaccagccaacagatgggattgtgacatacggctggagccagcatttaaatgatgtgactccatttttctgccttggtgctgccaattgggcccagaaccaaggtgatgtgagttttctgcctaaaatccacccacagggagcattatgacaaatctttcagcccatcaattgtttgatgtgacttttcttttaccggagctttttctttttttttttttgttatttttaattattataaatacataatggttatacatatttatcgggtacatgtgatattttgatacaggtgtacaacatgtatgatcaaatcatgctcactggggtattcatcacctcaagcatttatcatttctttctattaggaacattccaattcgacttttagttattttaaaatacacaataaattattgttaaacatagtcaccctattgtgctatgaaatactacattttattcattctatttgtgtttttctatccactctttattatcctctctttattatcctttctttcttctttttttaaaattatacattaagttctatggtacatatgcacaacgtgcagatttgttatatagatatacatgtgccatgttggtttgctgcacccatcaactcatcaatcatttacattaggtatttctcctaatgctatcctccctgccagccccccaccccctgacaggtgtgtgatgttccctgtcctgtgtccaagtgttctcattgttcaattcccacctatgagtaagaacatgtggtgttgggttttccgtccttgtgatagtttgctgagaataatggtttccagcttcatccatgtccctgcaaaggacaggaactcatccttttttatggctgcatagtattccatcgtgtatatttgccacattttcttaatccagtccgtcattgatgggcatttgggttggttccaagtctttgctattgtgaatagtgccgcaataaacatgcttgtgcatgtgtctttatagtagcatgatttataatcctttgggaacatacccagtaatggcgttgctgggtcaaatggtaattctagtcctagatccttgaggaattgccacactgtcttccacaatggttgaactaatttacactcccaccaatagtgtaaaagtgttcctatttctccacatcctctccagcatctcttgtttccttccttttttttttttttttttttgagatggagtcatgctctgtcccccaggttggagtgcagtggtgctatctaagctcactgcaagctctgcctcccgggtttacgccattctcctgcctcagcctcctgagtagctgggactacaggtgcccaccaacaagtctggctaattttttgtatttttagtagagacggagtttcaccatgtcagccaggatggtctcgatctcctgacctcgtgatccacctgtctcagcctctcaaagtcctgggattacaggaatgagccactgtgccaggctgtttccttaccttttaatgattgccattctaactggcatgagatggcatctcattgtggttttgatttgcatttctctgatgaccggtgatgatgagtatttttttcatgtgtctgttggctgcataaatgtcttcttttgagaagtgtctgttcatatccttcacccactttttgatggggttgtttgttttcttcttgtaaatttgtttaagtttgtagattctggacattagccctttgtcagatggatagattgcaaaaattttctcccattctgtaggctgcctgttcactctgatgatagtttcctttgctgtgcagaagctctttagtttaattagatttgttgccattgcttttggtgttttagtcatgaagtccttgcccatgcctatgtcctgaatggtattgcctaggttttcttctagggttttcatggttttaggtctaacatttaagtctttaatccatcatgaattaatttttgtataatatgtaaggaagggatccagtctcagctttctacatatggctaggccgttttcccagcatcatttattaaatagggattcctttccccatttcttgtttttgtcaggtttgtcaaagatcagatggttgtagatgtgtagtgttatttctgaggcctctgttctgttccattggtctatatctctgttttggtaccagtaccatgctgttttggttactgtagccttgtagtatagtttgaagtcaggtagcacgatccctccagctttgttctttttgcttaggattttcttggcaatgcgggctcttttctgattccataggaagtttaaagtagttttttccaattctgtgaagaaagtcattggtagcttgatggggatggcattgaatccataaattaccttgggcagtatggccattttcatattgattcttcctatccatgagcatggaatgtaattccatttgtttctgtcctctcttatttccttgagcagtgattcatagttctccttgaagaggtccttcatgtcccttgtgagttggatttctaggtattttattctctttgtagcaattgtgaatgaaagttcacaaatgatttggctctctgtctgttattggtgtagagaaatgcttgtgatttttgcacattgattttgtatcctgagactttgctgaagttgcttatcagcttaaggagatttggggctgagatgatggggttttctaaatatacaatcacgttatctttaaatagggacaatttgacttcctctcttcctaattgaataccttttatttctttctcttgcctgattgccctggccagaacttccaatactgtgttgaataggagtggtgagagaaggcatccttgtgttgtgcaggttttcagagggaatgcttccagtttttgcccattcagtatgatattggctgtgggtttgtcataaatagctcttattattttgagatacgttccatcaatacctagtttattgagagtttttagcatgaagggctgttgaattttgtcaaaggccttttctgcatctatctatcgtggtttttgttattagttctttttatgtaatggtttacgtttattgatttgcgtatgttgaaccagccttgaatcccagggatgaagcagacttgatcatggtggataagctttttgatgtgctgctggattcggtttgccagtattttattgaggatgtttgcatcgacgttcatcagggatattggtctaaaattctattttttttgttgtgtctctcctaggctttggtatcaggatgatgcaggcctcataaaatgagttagggaggattccctctttttctattgattggaatagtttcagaaggaacggtaccagctcctctttgtaactctggtagaattcagctgtgaatccatctggtcctggacttttttttggttggtaagctattaattattgcctcaatttcagagcctgttattgatctattcagagattcaacttcttcctggtttagtcttgggagggtgcgtgtctccaggaatttatcaatttcttctagattttctagtttatttgtgtagaagtgtttacaatattctctgatggtagttcgtatttctgtgggatcggtggtgatacccctttatcattttttatcgcatgtatttgattcttctctcttttcttcattagtcttgctagtggtctatcaattttattgagcttttcagaaaaacagctcctggattcattgattttttgaagtgtttttggtgtctatcttttttcagttctgctctgatcttagttatttctatttcttgccttctgttggcttttgaatttatttgctcttgcttctctagttcttttaattgtgatgttaggttgtgtattctagatctttcctgctttctcttatgggcatttagtgctataaatttccctctacacatagctttaaatgtatcccagagattctggtactttgtgtctttgttctcattagtttcaaagaaaaacgttatttctgccttcatttcattatttacccagtagtcattcaggagcaggttgttcagtttccatgtaagttgtgcagttttgagtttcttaatcctgagttctaatttgattgtactgtggtccaagagacagtttatagtaatttctgctcttttgcattttctgaggagtgctttacttccaattattggccaattttagaatagtgcgatgtggtgctgagaagaatgtaaattttgttgatttggggtagagagttctgtagatgtctattgggtctgcttggtgcagagctgagttcaagtcctggatatccttgttaaccttctgtcacatcgatctaacagtggggtgttaaagtctcccattattatgtgggagtctaagtctctttgtaggtctctaaggacttgctttatgaatctgggttctcctgtactgggtgcatatatatttaggataattagctcttctggttgaattgatccctttaccattatgtaatggccttctttgtctcttttgatctttgttggtttaaagtctgttttatcagagactagaattgcaaccactgctttttgttttgctttccatttgcttggtagatattcctccatccctttatgttgagcctttgtgtgtctattcatgtgagatgggtctcctgagtacagcacactgatagatcttgactctatataatttgcaagtctgtgtcatttaattggggcattttgcccatttacatttaaggttaatattgttatgtgtgaatttgatcctgtcattataatgttagctggttattttgcctgttaattgatgcagtttcttcatagcatcgatggtctttacaatttgacatgtttttgcagtggctggtacaggttgtttttttccatgtttagtgcttccttcaggagctcttgtaaggcaggcccggtggtgacaaaaatctctgtgcatgtgcttgtctgtaaaggattttatttctccttcatttatgaagcttagtttggctggatatgagattctgggttgaaaattcttttctttaagaattttgaatattggcccccactctcttctggcttgtagggtttctgctgagtaatctgctgttagtctgatgggcttccctttgtgggtaatccaacctttttctctggctgcccttaacattttttccttcatttcaaccttgatgaatctgccaattatgtgtcttggagttgctcttcttgaggagtatctttgtggtgttctctgtatttcctgaatgagaatgttggcctgccttgctagattggggaagttctcctggataataccctgaaaagtgttttccaacttggtgccattctcgccatcactctcaggtacaccaatcaaatgtagatttggtcttttcacatagtcttatatttcttggaggctttgtatgtttttttactcttttttctcttaacttgtcttcttactttatttcattaatttgttcttcaatcaataatatcctttcttccgcctgattgaaatggctattgaagcttgtgcatgtgtcatgtagttcttgtgccatggttttcagctccatcaggtcatttaatgtcttctctacactgtttattctagttagccattcatctaaccttctttaaagttttttttagcttccttgcgatgggttaggacatgctcctttagctcggagaagtttgttattaccgaccttctgaagcctacttctgtcaacttgtcaaagtcattctccatccagctttgttccattaatgctgaggagctgcaatcctttgcagaacaagaggtgctctgatttttagaattttcaggttttctgctctggtttctccccatctttgtggttttatctacctttggtctttgatgttggtaacctacaggtgaggttttggtgtgggtgtcctttttgttgatgttgatgctattcctttctgcttgttaattttccttctaacagtcaggtccctcatctgcaggtctgctggagtttgctggaggtccactccagaccctgtttgcctgggtatcaccatcagaggctgcagaacagcaaatattgcagaacagcaaatattgctgcctgatccttcctctggaagcttcatcccagagggcatccatctgtatgaggtgtcagttggcccctactgggaggtgtctcccagttaggctacaagggggtcagggacccacttgaggaggcagtctgtccattctcagggttcaaaacccatgctgggagaaccactgctctcttcagagctgtcagactgagacgtttaagtttgcagaagtttctgctggcttttgttcagctatgccctgcccacagaggtggagtctatagaggcagtaggccttgctgtgctgtggtggactccacccagttcgagcttcctggccactttgtttatgtactcaagcctcagcaatggtggaagcctctccccacaccaggctgtgaccttgcaggtcaatctcagactgctgcactagcagtgagcaaggctctgtgggcgtgggacccattgagctgggcacaggagaaagtctcctgttctgccagttgctaagaccatgggaaaagtgcagtatttgggtaggagtgtcccgtttttccaggtacagcctgttacggcttcccttggctaggaaaggaaaatcccctgaccccttgtgcttcttgggtgaggccatgccccaccctgcttcggctcacccactgtccaaccagtcccaatgagatgaaccagatacctcagttggaaatgcagaaatcacccatcttctgcatcgatcacactgggagctgaagactggacctgtttctattcagccatcttggaatggaatctaccagagctttttctatagaagagattttgatatattttggggcccagcacctatgtgatgtgactctcttctctttctttagccatgaccacagtgggagtccataacaccacaaaagtcacagagtgaattgtaactctcatgcatactgtacaaagcccttgaatagcactgtgtttttacagagatcagcacacaggtgacattgtgacactcatatgcacacccagaatcagtaaaaattgaatctttccatacagacacagctgacagttgagattctgaatctcacatccagaggcagttgaaagtttgaaaattgactctcatacatagactcattccagagatagtttgatgagtttcagaccaagattcagcacacctggaaggctgtgactcccctgaggggacagagtctgcaggagatattgaggctgtcatgtacgtatctatgccacagttcagattgtgactcatgcacttattttcaacctgcagtaggtgttgactcacataccaagaactaggaaatgtatgaaatttataatctcatcccagaaccttccttcaggtgtgattgcaacaaacacctcttccaagcacctgagtaatttaactctcctgcctgagcttagcttgcaaatgaaattgtgacatatcactggattcagtacctaggtgatatgactctattctcctgctttggtgctgcccataggggacattgtgacatatcagtaggcccagatttttttttttttttttgtgattgaacaatgctgcctgtacccttctttctgaaggagattttaatgtaattattgctgagcatccaggtgatgtggctctcctacctggtgcctgccctcaggaaagattgtcatgtacatcttggcacagatcacagatgcaatgatgactctcataccttgaaccagccaataggaaggtattttttctctttaggcttagggaaatgggtaagatcctgggtctcctctttgtatgatggtcataaaggattaccacactttcatttatcttacaaagctctctggtggtatggagagtgccatcacagggcctagtgcacaagtgaaattgtgtttattgtatgcacaccccatcaaccattaagattgtcaccttcacacatagaaagagccaactgatgagtttcttaatcacacagctatgaggcccacagttggaattgtgatcatcatatgagaacattctgccagaggtgagatggtaacccatctctaaacccaggtcataggcaagtgaggactatttgaactggacccagccaattgaagggatgttgactctgctgcttgggcttagggtcacaagtataatcatggatttatgttagcataaaagtcccagagcaaattgcaactcccacacataccttataaagccctcagtggtacagagactattttaacagggtacagcacacaggtgtgattgtgaagcttgtatacacatccaactgaagtaaagattgccatcttcttagatgaacaaagcccactgtcgaagttttgagtctcacacctggaggcagtggaaagtttgaaattgactttctgttccacagaagggtgagtgactgtaagatcaagattcagcacacgtgtgagaatgtgactccactacagaaatacagttcacaagagggattgaggctctcacacagattcagtccagtgttgagattgtgactgatgtacttagacacaacacaaagggcatgttggctctgttacctagaactgggacatgtgctggattcttaatttaatctctggaccttcctgcaggagtgacagtgacatgtgtctctttccagcacctgagtgatttgactcttttgcttggggcctgcccaaatatgagtttgtgacatatcactaaaggtagcacctaggtgatgtgactcattctctttacttggtgctggccataagagacattttgacatatcatgggccttgcaacctggtggtacgaatcttctcttctgtctttgttttttttttaaggcggcattgtgacatattgctgccctgcaaaagggttgtgtgacgctcctgcctgtgccctgtccacatagaccattgtaacatattgttgggtctaacactttggtgatgtaactctcctgcctggtccctgcctacagaggacattgtgacatatttctctgcccatcacccggttgatgtgactcacttctcctgcctggtctctgctcacagaggagattgtgacatatacctgggcccaggacctagctaatttgtcttttgtctttttacagctttctgccaacaagaaagatagtgatatataatggggtttaattccaaggtattaataatattgctattttcccttggccctgctctcagatggaattgggacatattgataggccccagaagcaaggcgatgtgagtctcctgcctggagcctgtccacagagggcattgctgcgtatctctgagctcatcaactatttgatatgactctccttttacttgagtttttttaaataaaagagattttgacatatctgtgggcccagcacctaggtgatggaactgtcttctgcctgagtcactcccacagatgagacagtgacttatttcttggaccagcacactagtgatgtaattttcctgcctgatttctgcacacagatttcactgtgacatatctctggccccatcacctatatgatttgacagtcttctttgttctgggacctctccacagtaggcattgtgatatatcacttggcctagcaggtaaggtgactcttctctcattcctgggccttgcccactaaggtaattgtgacatatagctgggctcagcccctaggttatgtgaatctcctctttttcctgagcccctgtcttagtccaatttcacactgctataaagatactacctgagactgataatttataaagaaaagaagtttaactgactcacagttccacatggctggggaggactcaggtaacttacaatcatggaggaaggcaaagagaaagcaaggcacatcttacatggtggcaggagagagagagagaaccagtcagaggggaaaagtcaaacacttttaaaccattagctgtcatgagaactcactcactatccatgagaatggtgtgaaagaaactgacccatgatccaatcacctcacaccaggagctcctcccttgacacgtggggattacaattagaaatgagatttaggtggggacacaatgccaaatcatattattctgcctcttgccccttccaaatctcatgaccttctcacatttttaaaacataaacatgcctccccagcagtcctcaaagtcttaacttatttcagcattaactcaaagtttcatctgagaaaaagcaagtctcttccacctatgagcctgtaaaatcaaaaagcaagttagttactttcaagataaaatgagagtacaggcattgaggaaatgttcctgtttcaaatgggagaaatttgtcaaaacagtggcgacatgttccatggaatctcaaaatccagcagggcagtcattaaatcttaaagcttcaaaatcgtcttctttgactccatgttacacatctatgtaatactgatgaaataagtgggctcccaaggccttgggcagctccactcctgtgactctgcaggttacagctcccgtggctgctttcatggcctggtgttgagtgccagtgctgtttttaagcacacagtgaaagctgttggaggatctatgcaagctgttgatgggtctaccattctgggttctggaggatggtggccctgttctaacagctccactaggcagtgccccagtgcagactctgtgttggggctctaatcctaaatttcctctctgcattgccttagtagtggttcttcataatggctccacccctgcaaaagacttatgtctggacattcaggtgttttaaacatcctctaaaatctaggcaaaagttaccaattctcaacttttgtcttctgggcacccacaggcccaagaccacatggaagccaccaaggcttggggcttgcactctctgaagcaattgtctgagctgcaagttggccccttttagcgatggctggagctggagcagctgagacacagggcaccaattcttaaagctgcacagagcagaagcctgggccccactcatgaaactatttttgactcctagccctccaagcctttgataggagcagctgctgtaaagatatctgaaatgccctggagacatttttcccattgtcctggctattaacatttggctacttgttacttatgcaaatttctgcagccagcttgaatttccctccagaaaatatgctttttaaatttttctttttttttttttcttgagatggagtctcaccctgtcacccaggctggagtgcagtggcacgatctcagctcactgaaacctttgcctccggggttcaagcgattgttgtgtctcagtctcccaagtagctgggattacaagtgtgcaccactacacacagctaaattttgtaattttaatagagacaggattctgccacgttgaccaggctggtctcaaactacttgcctcaagtgatccgcttggcctcccaaaatgctgggattataggcatgaacaaccatgcctggctgggtttttaatttctactgcatggtcaggctgcaaattttccaagattttatgttctactttccttttaaacataagttccaattttagattatctctctcaagttcaaacttccacagatctctagggaaggggcaaaatgctgccagtctcttagctaaaacatagcaagaatgacctttgcttcagttctcaacaagttcctcatctccatctgagaccacctcagccaggatttcatcatcaatatcactataagcattttggtcaaaaaacattgaaaacctctctaggaatttccaaactttctcacatcttcctgtcttcttgtgagccctccaaacttccaacctctgcctgttacctagttccaaatttgcttccacattttcaggttaactttatagcaggaccccactctgctggtaccaattatctgtattagaccaattttacactgctataaatatactacctgagactgggtaatttataaaggaaaagggtttaattgactcacagtttcacacagctgtggaggcctcagaacacttacaatcatggcagaaggtgaaggggaagcaaggcacgtcttacatggcagaaggagagaaagccagtgaggggagaccttccaaacacttttaagctatcagatctcataaaaactcactcactatcatgagaagagcgtggggggagccaccttcatgatccaatcacctctcatcaggtcccttccttgacacatggggattacatttcaagataagatttgagtaaaggcacagaatcaaaccatatcagcctctcacttaggtgacgtgactctatttttttggcccttaactcagggaatattgggacataagactgtattcagcccctatgtcatgtgactctcttctccttcctggactccacatatatcatgtattgttacatattgctgggttcaacacctaggtgattcaacccagtagtatcttttcattcatcactgatattacgtgactctttccgtcacataatgggtcctcagtcttgccaaataaaggcattgtgatatttcacttaatcctagcacctaggtgatgtaacacttctcttttgtctggacacttgcatatttttggtagtgtaacatatcacttggcccaacacctagaatataggaggtttctgccagggccctgcctacaggggggcctgtgacatatttctcctggctgtggaacccagtacctaagaaatgtacctcttctgcctgcagtttgccaataagaaatgttatgatatattgatgggtccagcaaccatgtgatatatctctcctgctttggcctcatcaacagagagcattgtgacatacccgcgagccaagcacacagatgatgttattctgctgcctgtgccctgctttcaggagtggattgcaatgtaacactggctgagtacccaggttaatgacactgttgcctggtccctgttctcagggaagactgtaatagacccctgacccaatatccaggtaatatgactctcttgctcactcactacccacagttttgtttgtgacatatatcttggccaagttcacaggtgtaatgatgactctcatacttcaaaccagtaaatagaagagatactgtctcttgttattaggtattggcaaatgagtagaatgctaggtctcctctgcacaaatgttatagaggtattccactcttttaaatatggaataaagctcctcagtggcacagagtgtttcagcacccaggtgagattgtgttttctgcatgcacacttttcaaccactttgaatgtcaccttcacacatagacagagcccacttctgaggtcctgaattaatacatgacttgtgtacttatatccaacatactgaaagtgcttactctcatacctagaaccaggacatgtgcagaattgttaatccttttactgaacctccctgtatttttgattgggacatatgcctttgaaaaacattgaagtaatttgactcttgttctttgacccagccttcagatgggattgtttcatatagctgaaccagcacccatgtgactcttttctcctgccttgagctgcacacagggggcattgtgacataatgctgggtcttgaacacaggttatgtaagaatccttttctattttggtacattttgagatggagtttcattcttgttgcccaggctgcagtgcaatggcacgatctcggctcaccacaacctctgcctcacaagttcaagcaattctcctccctcagcctcctgagtagctgggattagaggcatgtgccactgcacctggctaattttgcatttttagtagaagtgggttttatccatgttggtcaggctggtctccaactcctgacctcaggtgatccgctcaccatggcctcccaaagtgctgggattacaagcgtgagtcaccacacctggccatcttggtattttttacagagggcattgtaacatattgctgggccccacactaagttttctgtgaatcttttgtggcctggcacacttactgtgacatatggctgcgtcaaacatgcaggtgatgtaactattctgcctgagccctctttacagggagcattgtgacatatctctgtgtctgttaccccagtgatgtgactctcctctgcctgattcctgctcacaaacagaattgtgacatttttgctggacccagcctctagcttatgtggctctattctcctgtcttggtgctgcccgtaggggacattgtgacatacttcttggccatgaacccaggttatgtgagcctttctgtgccctgcccatgtggacaattgtgacatattaccgagtcctacacccaggcgatgctactctcctgtctggtccttgcctacagggaacattgtgacatatctctttgccattcatccaggtaatgtgggtcttttggtttttcttgttttccctcacaggggagattgtgacatactgctgggcccagcatttggttatgtgactctatattcctgtctcggagttacccacagagggcaatgtgccacatcactggaccttacatccaggtgatgtgagtctctttttctgccttggcactgccccacaagggttacttgattctcctgcttgtggtctgccctcatgggtcattgtgacatattgcagggtccaacacccaggttatgtgactctcttgcctgggccaggggaacaggggtattgtcacatatctctgtgtctatcactcaggactcttttcctgtctggtgtctgctcacagaggagatttttacctatcaccgagttcagcacttagctgatgtaactcttctctgcttcctaggttctgcccacagggaagattgtggtgaattactgaacgcgatacctagatgaaggtactctttttcctaggccatgccctgtgaagacattgttgcatatttctttgtctagcaccaagctgatgtgagtctctgccttgaccctacacacaggaagcattgcaaaatatctctgtgcccatcaactatttgatgtgacccttatctcttatatgactccttctttaggagatattctaacatattttttgggctagcagtgaggtaatgtgactctcttcttctgcttgtttcatgctcacagaagggagggtgacttattgctgaacccctcacacaatgggcacatcacacaaacagatgtgtcacaatgacccctgtcaacaggggtcatggtgacatatattcaggacagtattctagataatgtgactctcctcttcttcctggtacttgtctgcagtgacgattgtgacatatagattggtacagtacataagtgatgtgagtctcttttcatgagcacagactcaggatgtgagtctgtgctttgcccattgaagagatcatttcatatagctgctccctgaccttgattttgtgactttcctctttttcctgagttctacctgcagtgggcattgtgatatatctctgggacccccacctaggtgaggtagccctcatgcatgggtcatcctttcagtgggcattgtgacacatttctggaccgagtacttaggtgatgttactctcctcaattgcttttatgctgccaatgacagatgatgatgttttgctgggccagacacctcagtaatgtgactcttctctttgggctatgccctgcattcattgcatattgtgacatattgctgggcctaacacctagttgatgtgactctcctgaatgggccttgccatattttcactaatcacctaggtgatgtaacattcctcttctgccacggcctcaccaaaagtgggaattgctatatatgactggactcagcatctaggtgatgtgactccttttttacctgatcataagatatactgggtattgtgatatgtcactgggcccaacacttatgggacagaaggctcctgcctcagccctgcccggagggggccttgtaacattctctacatccataacctaaaaaatgttactctcctattctgcctacaccagccaacagaaaaatttgtgacacattactaggcccaggtgacttgcttctcttgcctgggccttgccaacagaaagcattgtgaaatacagaaaacaccagcacaccggtgatgttactctgtttcctgtgccctgctttcaagaggaaattttaacatatcactggccaagcacccaggtgctgtgtctctcctgcttggtccctatttccaggaaatattgtgacatatttctggctgagcaaacaagtggtatcactcttctgctccctacttatttacagataaaattgtagtatgtattatggcccaggtaacaggtacaataatgaatctcataccttgaacagctaataaaagagatactgtctctcatagccaatcataagaaaaagagtaagaaacttagtcttttctttgtacgagtgtcataaagaattaccactctgtcacattttgtaaaagatagcacagagagaagcattacagggcacagcacaaacatgaggttgtgttttctgtatgtacaactctccaaccattaggattgtcactctcatatatagacagaattcagtggtggtgatttgaattccacacatggaataagtctacagctgaatttgtgactgttatacatgaatatctggccacagttggaagggtgactcatttctaaacccagttcataagcaagtaatggctttcccatctggtcccagccagttagagagatattgactcccatagctgtgcttagtaaaacagatccaatctgtggttcatatcaacatgaaggtctcaaagcagattgagactgtcatacatatcatataaagaccacaggtgatacagagattgtactaacaaggcccagaacacaaatgaaattgtgacattcacatgcacacccagccaacagtaaatatttttatgctctcacataaacactgcccacagttgaggttctgaatcctacatctgaaggcagtcaaatgttagaaaattgacttgtatacatagatctggtccacaggttcattgttgactttcacactatgattcagcacagcagtgagtcagtgactttactatgaagacacagggtacaggaggaatcgaggctgtcttgcagtccactgttgagattgtgattcatgtacaccgactcaacattcaggaggtgttgactcttagacatagaactggaacatgtgtagaattgttaatctcacccctggatctttctgcaactattattgtgacatatgcctctcccagcccctgagtgatttgactctcttgttggggcccagctgacagatgggactgtggcatattactagactcagcacctaggtgaggtgacattattcttctgccttggcactgcctacttggggctttatgacatatgtctgggttcataactaagatgaagatttctcttatcttgccttgtctttgctcacatgtgagatagtaacatattgctggactctgtacctagtggatgtatctttccttcttctgagttctgctcacaggggagattgtagcatatcactgggctcaataccaaagtaatgttactcttgtgacacattgtgacatattgttgggcccagaaccaaggtgatgtgagtctcttgcatggagcctgaccacaggaaccatcatgacatatttctgaaagctcaactctttgatgtgattatattcttatacctgctctttgcccataggagagactataacatacctcttggcccagcacctagttgatgtaactctgctctcctgcctgggccacacctacagaagaaagagtgacttctcactgggccagcacacaggtcatgttattttactgccttgatccttgtccacaataatcattgtacatagttttgggctcttctactagaagacgtgagtctcctcttcttcctgggatctgtccacaggggggattgtgacatatcatttgacccagcacctatatgatgtgaccatcatctgatgccttggcccttctcactgggctgattgtgacatataactgggcacagcttctaggttatgtgactcttctcttcctcctgggtcctacccataggaggcattgtgacatatctctaagcacttaaactaggaaatatgacacttttttctgggctctcccctaagagagtactgtgacgtatttctggacccagcacctaggtgatgttacacttctctcctacctgttacctgttactggcagcaaatccatatgggcatggatctgcagcaaccttaattcttacctcctaagaagaaaaaactcaacttagaggcataaggcagaaggagagactgaggaaagttttagaacaggagtgacaactgtagaacagaaacaaaatgaaggaaagtacacttggaagagggccaagtgggtgactaaaaagggaagtgcacggtttgacatttgacctggggttttctatgttggcatacttctggggtctcacattaattctccccattgcctaactcctgagatcttattgggaagttgctgattaccagttttaggtaatccactaattgtctgcttgagaggagaagagatgctgaagttaacagtgggtccctcttcatccttggggttctggaatgaatcagtcttaccatgtacccctaacttttcatgcccttatcaagaagcaatgtttatttgaatcaggtgggcaaagtgtttcaaaagtcactggaaaactcagttctgggacataataggaataaaaagtatacagtaagtcataagaaactgacagagccagagttcaaattggtgcctgtcctgacaatgtgccagcagacacggaagggttggaggtcatctgagcaggtagggtaagaacaagtataaatctcaggggatatccacaagggagccagtgtctttgctgccatgcaaatgcagtaaaagccatggatgcttaaataacagggagtttgtgtttaagaagtcacatggcacgtgaagtgaaagcaaagaggcagatgtgccccggaagcagatagtccagcaggtgagtaaggccatttctgaacacacacagggaacacaggagaatagacagtgcaggttttggggaaagagacaattttagtaggaaccctaagacatttcatggtgttcagctttagccctattactcttgagagtctcctgtccaggagggccataagtgcatcagttctactcagcatggaccccaaggttcttcccacccctgcaaaccatctgtcagggtgagcagagagatagcccatggaaacagagccacttgtggctgagaggaatcattctgggagctggttagtaagccatagagtgaaagggaaaagaaaatcatatagaggggttagctgcctctagccaatgaaggtgaggcataaaggtctttcaccactaggggacatatctgagtcatgcacaccaaagcatgttagcagcaaaaggtaccaagtcacacagcaccaaaacatgttaccagcagtgaatccgcatgggtacgggtctgtagcaacctcatttcttgcctcttcagaagaaaaaattgactgaggggcttaaggcagaaagagagactgggggaagttttagagcaggagtgaaagtttattaaaaagctttagaacaggaacaaaaggaaggaaagtacacttggaagagggccaagcaggtgacttcaaaggcaagtgagcggtttgactttttgactttgggttttatatgttggcatacttttggggtcttgtgttacttttcccacctcacccaactcctgagatcttattgggaagctgctgatcaccagtttcacgtgctttctatttaggagactgtctttccctggtgccggttgtcaccaattattactttagagagacagttaacaactgcctgaccatcacctaatggctgactgacactcctggtgtgtgtgttgagggcggagtcctctcttgccctgctcatacctcactggctacctactttaacactgcaagcattgtgtaatgttggtaaaggagttagaaagaaattatttaggcagatagtgagggtaaaagagtcctcaccagaatttttcttctaacaaaaagcagcccaagaaattttctttttcaatcatcagcctgaaaaattgagctgcaaaaacagataagcaacctggaagtttttatgggggaatgccagcagttgtgttaatagaaaagggcaacctgggggctgggcatatccaaaatgggggctccatctttccttctttgtgaccatgtatacggtaaagaaatcggcaacatggtacccaccaggcaaagaacccatatgcataataaagaattagggtgtggtggccagctttttgttctctatgcaaatggcacacctggtccaaccaatcttttgcaccctatgtaaatcggacaccacctcctcaagcttatctataaaacctcctgcatttcaccatggaaccagtaaccaatctctgtgggactcctctctactgcagagagctcttctctttctttgcctattaaacttccactcttgacctcagtcttgtgtgtctgcatccttgattttcttggtgtaagacaagaaactctgggtatcacaccagacaataaagctgcttcattgtgactctcctgcatggatatatatatatacacacacggatatatatatatatatatagatatatatatccatatatggatatatatatcgatatatatatctatatatggatatatatatctatatatggatatatatatggatatatatatctatatatggatatatatggatatatatatggatatatatctatatatggatatatatatggatatatatatctatatatggatatatatatggatatatatatctatatatggatatatatatggatatatatatctatatatggatatatatatggatatatatatctatatatggatatatatatggatatatataactatatatggatatatacatctatatatggatatatatattgattatatatagatatatagatatatatatggatatatatatctatatatggatatatatggatatatatatctatatatggatatatatggatatatatatggattatatatagatatatatagatatatatatggattatatatagatatatatagatatatatatctatatatggatatatatgatatatatggacatatatggatatatatatggatggatagatagctagatacagagagagacagtctcattctgccacccaggctggagtgcagcagcacaatcttgtgtcattgctaactctacctcccaggttcaagtgattttaatgccccagcctcctgtgtagctgggattacaggtgtgcaccaccatgcatccatccatctttctttctttctttctttctttctttctttctttctttctttctttctttctttctttctttctttcttctttctttccttttcttctctttctttcttctttctttcttctttctttctttctttttctttcttctttcttctttttttctttcttctttctttctttctttttttgtattttagtagagattgagttttgccatgttttccaggctgatctcaaacttctgattacaaaaaatccacctgcctcagcctcccaaagcattggaattacaggcatgagccatcacagctgtctacaatatacttttacatttatgatttaggtgatgtgttcttctctttctgtcaggtgcgggatggttaaatatcactggacctagcacctagggaatgtgactcttgtcttttgcatcagccccactcgttttgagaactgtaacatatcactgggccaaacacctagaagatgggaagtgtctgcctatgccctgcaaacagggctttagccctaccactctcaagagcctcgtgacatatctctgcattcatcatctaggagatgtgactcctccctgctgcctgcgctctgcctacagggaagaccataacaacatttggcccagcaacacggtgatgtgttttttcccagggccttgctcacagggagcattgtgacatatcactggaaccagcatccagggctgtgactctgtgtcctgctgttagaacaggattgtaacatatcactgaccaagcacccaggtgatgtgactcttctgcctggtgcctgccttcagggaaaattgtgacatatgcctggcctagcaccaaagtgatgtggctctcctgctacctctatgcacaggtgggattgtgacatataccttcattcagctcataggtgaggtgataactctcataccacaaaccaaacagtaggagagatgctgtctgtcaaagctaagcttacagaaatacacaagattcagggacttttctttgtataaacattatagtagattactgctctcttgtatataatataaacttctcaggtggtacagagagtgtcatcacagggcccagcgcacaggtgagaatacattatttgtatgcacgccccaccacccattaggattttcaccctcaaacatggaaagagcctactggtaaggtcttgaatctcacacctggatgcagtctacagttgaaattgtgattgtcataggtgaatatccagctgcagttgagatggtgactcatttctaacttagctctgaggcaggtgaggactgttttatttggaaccagccaattataaagatgttgactctcatatttgagcttagttctacaggtacaatcatgggtccataacatcatgaaggtcatagagcagtttgcaactctcattaatactgtagaaggctcttgggtggtactgagagggtcttagcagagccccgcacacaggtgagattgtgacactcatatgcacacccagccaacaataaaacttttcatctttccacatgaacacagcccactgttgaggtcctgagtctcccttgtgaaaacagtgcaaagttgaaaaattgactcttatatgtggatttggttcacagatgggttggtgatgctcagacaaatattcagcacacctgtgagtctgcgactccagtaatcatccacagtctgcaggagaaattgaggctctcaccaacaaatcaagtgcacaattgagattgcgactcttgtactcagacccaacatacagaatgtgttgactctcaattttaaaaccagaacatgtgtgagattattaatctgatctctaaaccatcctgcaagtgtgattgtgacacaagtctctgttcagtacttgagtgatttgactcctttgcctgggcccagtccaaagatgtaattgtgacatatcactgaaaccagcatataggagatgtgtctccatactcctgccttggtgctgcccacagtgggcactgtgacatatcactgggccttgtatccaagtgatgtaagtctcttctttcttgatactgaccacaggagacactatgacatatccctgggcctcaagctcagcttatgtcattctcctatttgttctctgtccacatgggccattgtgacatactgctgagtttggcatccatgtgatataacacttcagcctcagctttgctcacttggggcattgtgatgtatctctgcacccatcacttagatgattcaactcttttcttctgtctcatctgtgcttaaaacgggcaattgttacctattgctgggtccagcatgtagctgatgtgtctcttctcatcttcctaaggactgcctgcaggggatatggtgacattttactttgcccagcaccaagatgacttgaatctgctgcctttgttctactttcagaagacattgtgacatatcgctgggcctagcaccaaggtgatgtgaatcttctgcctggacctgctcacagagggaattgttacatatttttgacttcatcaactatttgatgtgactctcctctctaacctgggccttgcccataaaaaacattgtggcttatctctgggcccaaaacctaggtgatgtgactgtcttcttagggtcatgcccacagtagagagatgccttattgctaaacccagcacacaggtgaggtgattcttctgtctggtccctgcccacaggggtcatgatgacatctctctaagcccatcacctagattatgtgagttctctttttcttctgttagctatatagaagattgtgacatattgcttggcccagacctcatgtgatgtgaatctcctctcatgccttggtcctgtttttttttggccgttgttgttttgttttgttttttgagatggagtcttgctctgttgcctaagctggagtgcagtggcataatctaggctcactgcaacctctgcctcctgggttcaagttattctcctgcctcagcccctgaatagctaggattaaaggtgagtgccaccacactcagctaatttttgtatttttagtagagatggggtttcaccatgttgattaggctggtattgaactcctgacttcgtgatcaactcgcctctgcctcccaaacttttgggattacaggcatgagccaccatgcccagtcaagatgatgatacatttctaaacccaggttataggcaggtgagggttcttctacctatacacacgtttaaagggatgttgaatctcacacgtggtctcagggccacaggtacaagcatgggtcttcaccagcatgaatatctcagagcatactgcgactctccagtgtaatgtataaagctctcaggtgggacagtgtcctaacaggatccagaacacagaaaagatgttgatgctcctatgcacacccaggtcacagtaaaatatgtcattttcccacataatcatagcccaatgttgagattctgcatctcacacctgaaagaagttgaaagatggaaaattgactctcttatatagatctggtctacaggtaggttggtgacattcagatcaaaattaagtacacttgtgaggctataactcttctaagaagacacagctcacaggagcaactgatgctcctatgaacaaatccagtccgtgattgagattctaactcatgtacttattgtcaggcctctgagcccaagctaagccatcatatcccctgtgacctgcacgtatacatccagatggcctgaagcaaccgaatatccacaaaggaagtgaaaatagccgtaactgatgacattccaccattgtgatttgttcctgccccaccctaactgatacgatatattctccctctgccctgaagaaggtactttgtaatagtctccccccaccttaaaaaggtactttgtaatattctccccacccgtgagaatgtactttgtacacctatcccaaacctataagaactaatgataatcccaccacgctttgctgactccttttttggactcagcccacctgcacccaggtgaaataaacagccttgttgctcacacaaagcctgtttggtggactctcttcacagggatgtgcatgacacttagacccaacatacagcaggtgttgactctaatgactagaaccaggacttatgctagattgttaatctcatccctgaaattttctgcagatgtcattgggacatacacctgtgcccaacagctgagtgatttgtctctcttgcttggtcacagctcacaggggccattgtaaaatactgctgatcctgttatccaggtgatgtgagtcccctcacctgctttggcactgcccacagggaacattatgacatatgactgggacctgcacccaggttatgtgacttttatgtttgtgctctgcccacataagacactgtaacgtattgccagtccaacatccagatgatttaactctcctgcctgagctctgcctacagagagcattgggacatatcccttcacccatctttcaggtgatgggactctatgttcttgcctggtccctgcttacaagggatattttgacatatcactgggcctagcacctagcaggtgtcttttctcttctgccagagttctgcccaaagacgagattgtgacatatgactggttccaacagcatggtgacatgactcttttgtcttgaccctgccctcagaagacattgtgacatattgcttgactcagcatcaaagtaatgtgagtctcctgcctggactcttcccacaggaggcattgtaacatgtctttggatgcaccaatcatttgatgaaactctactctcttatttgggatatgcctattagagagactgtgacatatatctgggctcagcacctagacgatgtgaatcttgttccatgcctgagcactgcatatattgtgtattgtgacacacggctgagccaacacctaggtaatgctgcttttcaggataggttcttccaactgtagtattgtaacatatcttttcatttatcttctaagcgatgtgactcttttttctgtctgggccctgccaaaaaagaagaccatgacatatcactggacccaccacctaggtgatgtgagtcttctcttttacctgggcctctcatattttgagtattgtgacatattgctaggcccaacacctagggtatgggaagctcttgcctaaaccctactcgcagaaaaccttgtgacgtatctcttcatacattacctaggagatgtgactttcttctgcttgcaccctacccataggaaacattgtgacatatagctaggagcagcacccaggtgatgtgactctcctgcctggtctctgtccttagggaatattgagaaatatctctagactcaaacccacatggtgtgactctgctgctcactccctatccaaaggtggaattgtgacatatgtctttactcaggtaacagatgtgatgatcaccctcattcctcaaaccttccaataggagaaatactgtcttttgtaggtaggtactgagagtgtcagcacagggcacagcacagaattgagattgtgttttatatatttacactgtggcagtcattaagatgatcaccctcacacatagactgagcccactggagaggtcctgaatcccaaatgcagatgcaatctacagttgcaattgtgacagaacagtcagcacctgttaggatagtgattcatttcagtaggcaaagacttttctatctggaatccaccaatcgaagagatgttgaccctcatgcctgggcttaaagccacaggtaaaatcatgaatccatactagtatgaaggtttcagaacagattgtgactctcgtgcataccacataaaacccttgtgtggtacagagagtgtcctaacagggctgaggaatcagatgagattataacacctgtatgcacatccagctgatagtaaaaaattgtcatcctcccacatgaacacagccctcttttgaagttcttaatttcataccctgtggcagtggaaagttggaaaactgactatcatccatggatccaatccacaggtgggttgtttaacctcaaacattcagcacacatgtgaggctgtgactccacaaagaggacagagtttgcaggagggattgaggctgtcatgtatggatctactctctcattaagattgtgtgactcctgcttttagagccaacacacaggaggtgttgactctcataaataaaacctagatgggttcaagattgccaatcacatccctggaccttcttaggtgtcattgtgacataagcctctgcccaggaccttagtaatttgactcccttgcttggggtcagacaacagacagaaatatgacacatccatggacccagcacctaggtgatgtgactttattcttttgctgtggctccacccgtagagagcattttcacacatcaaggtgctctgtacacaggttatgtgactcttttgcctgtgtccagacaacgttggccattgtgacatattgcagggtccaacacccaaaggaagtaactcttatgacagggttctatctacagagggcactgttacatatttctgtgctcatcattcagttgatgtgactctcctctcctgcctgggccatgccttcaggagagtgggagatagggagagtgacttattgctaggcccagaacacaggtgatataatacttcttccaggtctccttcttcaagtgttactataatatatcgttagtcccatcacatagaagatatgacacttccgtttttttctgcaacttatgcacagtgtggattgtgaaatatgacttggcttagcacctacatggtgtgattctcttctcatgactaggtcttatccactgcgttggttgtgacataaagctgggcccagtcactaggttatgtgactctcctctttttcctgagccctacccacaagaggcattaagacatatctctgggcccattcaccttggtgatgtgaatctactccctgggacaccccccccaggggtattatgaaatattgctggacccagcaccttgtgatatgactcttctcttttgcctgggcattgcatacatgtgtattgtaatatatcgctatgttaaacacctgggtgatgtgactttcctgcataagctctgtccataggcatatgatgatatctcattttgttcatcacctaggtgatgtgactctactcttttcctgagccctgcaaaaagaagagattgtgacatatcactgaactgagcaccttggtgatgtgactatcctctcttgctcaagtgtcacatattattggtattgtgacatacctctgtgaccaacacctatgggtaggaaaacttccacccagactcagcccaagggaccctcatcacttttttaaaagatatgtgacttgaaaaatgtgactgtcttctgcctataccctgccctcagggaagattgtggcatattactgaactaggcaacctagtgatgtgtctcttctgacaggggtttgcccacatagacaattgtgacatatcactgggctcaggacccaggtgatgtgactctgctgcctgttcccaacgttcaagagaggattgtaacatatccctggccaagaactcaggtgatttgactctcctgccttgtccctgtcctcagagaagattgtgatatatcttcagccccaaacccaggtcatgtgacttccccactcgctccctattcagaggagaaactattacatatatcctgggccagctcacaggtgtgatgacaattctcatacctcaaacaagccaatagaagagatactgtttctcattgctaggcttagaaaaactggtaaaatacctgtgtctctttgtatgaaggtcatagagaactaccacaaacttgtatatggaataaaacccttcagtggtacagagagtgtcatcacatgtcccaaaacaaagaggatattgcgtttcttgtatgcacatccagccagctgttaggattgtcaccctaacacctggatacaacccattggtgaggtcttgtgtctcacatgcagatgcaatctacagtttgattcctgactgtcatatgtaaacacctgtccaaagttgggatgctgactcatttctagacccagctcatagacaagtgaggactctcctgtctgggtccagtcaatttgagaaatattgacttttctacctgggcttagggagcagtacaaaggtctcagggcaaattgtggctctcattcctattctacaatgatcttgggtagtatagagaatgtcctaacagggttcagcacacaggtaagattgtgacagtgatatccacacccagctgacagtaaaaattgacatctttcctcatgaatacagcccactgaatacagcccactgttgaggcattgaatctcataaccaaaggcagtggaaaattgaaacattgtctcttgcttgtagacccaatccacaggtggattggttactctcagatcaaaattcagcacacttatgaggccatcactccagtaagaaaacagaatttgcagaacaaattgaggcttccatgcacaaattcagcccactactgagactgtgactcatttacttagacccaacatataggaagtgttgactcttatacctagaattgggacatgtgtaagattgttcatcttttccttagactttcctgcaggagtgatgctgacatgttcctctatttggcatctgagtgatatgacccttgccatggtctagcccacagatggaattgtgatgtgttgctctacccagcacctaggtgatgtgactccatttttctgccttgacactgtccataaaaggtattttgacatatctctgggatatgtacccaggttacatgactctcctgcctgtgtcctgtccacaaattatgaaatattactgggtccaacacccagggatgtaactctcatgcctaggccctgccaacagggggcattatgacaaatctgtgtgccaataacccaggtaatgtgactctctttttttgcatggtccctgctcacagggggcattatgacatattgctgaactcagcatctaactgatgtgattctcctttctactttttgcccacagtggagattgtgacatatcactgggcctcaaactaatgtgatgttacactttcatttttgaactgaactcagaaggcactgtgacatattcctgggaacagcaccaaggttatgtgagtcttctgcttgcactttgcccacaaaaggcgttgtaacatatctttagacctgtcaactatttgatgtgacttatttttttaaagtgaaagcaagtttattgagaagtaaataaacaaaagaatatctactccatagatagagaggccctgagggctgctcattggctctttttatggttatttcttgattacatactaaacaagggatggattatttgtgagttttccaggaaagggatgggcagcttccagaaatcagggtgcctcccctttttacaccatataggatacctgcttaacattgccatgacatttgtaaagtgtcatggtgctgttgggagtgtcttttagcatactaatgcattacctttagcatataatgagtagtgaggactaccagaggtcactttcattgcaatttttcttttggtgtttttttgctgtcttttgtactgcatcctctttcatcagaaagatctttctgaatggtaccttgtgctgacctcttgtcttatcctgtgacatagaaagtgtgatgttctggaagtcaggaattgtgttaattcctttctttttgaggtctcaggataacttgggactgttgggcctgtcagaaagtgacattccttacttaccacatgtcaggaaccctgcacagggactttgtagacaatgtagaaggccaattttcccaaggccaattttagagcttttactggctctaaaaatcaagtatgatttctcgaagaaaagaccattattccagtcaaagccttggtaaaataacctgtgtctcccattgtgtcctgttgcaaatgaaaacatgcttattgcacttaagcaaataactatattgccataaattaagaatactcaccaatatctttgcacattctggagaaatcagggagagagaaacaaatatattccaaattatgtttacaggagtctattttcctccatcgttaaaagctgtaaatagctcaaaagtgctcttgactctgaaaaacaaaggatccacaacattttaagcaaaaagccaaaaaatattacttccatcttttattagtacagttcatgcagtaaactcttgttctccttgatatttattagctttccatgagagtcttgaaagtttttctcctgttctaattttgcagtcttcaaagttatcagaaatttacatttaaaagcacccatcaatgttccatagcatactataggtcatcttttgaaaaggattaaaacaggacaacaattgtctgtgggtgataaaaaagccttagaacagccattattaaaaccacaattgacggccgggtacaatggctcatgcctgtaatcccagtattttgggaggtcgaggcaggtggattacctgaggtcaggagttcaagaccagcctgaccaacatggaaaaaccctgtctctactaaaaatacaaaattaaccaggcatgatggtgcatgcctgtaatcccagctactcaggaggctgaggcaggagaattgcttgaacccggaaggcagaggtttcagtgagctgagatcgtgccattgaactccagcctgggcaacaagagtgaaactccatctcaaacaaaacaaaacaaaacaacacaaacaaaaaccacaattgactagaaatattggttactcttgtggaataaaaaattttacataacaattataactattagtaacatactatacactaagtcatatgagacttacaggagtattccataattttagaacactcaccaatgacttatttgtacaaatacaaccccaagaaagccaaataccatttcatgtttgacaatatattctatataacttttataccaaataaattgaatatgtcatttttggactttaggtgacctaatatctaaaagattaattaggtcagaaaagacaaaatttataatttaattttggaaagtttttcaaatagcaaaggtttaaaacattttacattataaaatcaaatcccaggtcaccctatgtcattcatttagccaaaatggtaacttttctttttaaaaaaatttttaaaagccagaaacctttacttattaacagaagaaagacttagctttccaaacaatctgtctcttgtctttttgctgtagtttattcaaaagacaaaccaaaatctttcattttttacatatcacatgaatatcttgttcaagagtgaaagtctatatttcacctttgtgttagtatactaatgatgccaaacccatttcttaataaaaccttatatacaaacatatgaaatcttaattagtttgactataaggtaagattctcagaaatcttttaaaaccctttaaaatgtttgttgaagagcaaatctgtgctctaagaaaaacctgctgtgctcttattctaatgttcaatttatggaaaaactgagtaacatctatttaactttagccagtatgttcacacacagaattttttatgagattaattttttagaaagcttccagaacttgttcaaaccttcaggtttattctaattttaaacaaacctttagatctctgacttaggaaccaaaattaacattcttatgcctttttttaaatcttaagctgaaagcacattctacttttcttacacaccttgcatgtaaagctgtttttatttcccaaagattacttatgtcacatgaactaaaaggcattcacacatgcacacagtgcactgatgaggtcttcaacctcatgggtggatgcagttcagttggaattgtgactgtcatatgtgaacatccagccacaattgggatggtgactcatctctaaacccagctcatagacagttgagaaatctatctgaaccaaatctactgaagagatgttgactctcatgaatgagcttagggtcacaggtacaatcaagggtgcatgctagcatgaaggtctcagagcagattttgactttcatgcgtaccatacaaatactttgaatggtagagatggtgtgcccacgaggcccagcacacaggtaacattgtgatactcctatgcacaggtagtcaatagtaaagactgtcatttttccacatgaatacagcccactgttgaggtcctgaatctcccacccagaggcagtggaaagttggagaattaactctcatgcgtggatctgatacataggtgagttggtgactctcaaagactccccacggctgtcaggctgtgacttcactaagggaacacaggtttcaggagagatttagtctcttgtgtacaaattcagtcccttgttgagactgtgactcatgtgcttagaccaaacctacaggtgttgactctcatacctggaactggaacatgtgtgggattaatcttatccctggaccttcctataggtgtgaatctgatgtatgcctctgtccagaatctgagtgatttgactctcctgcctgggtccagccttcagcagagatcatgacatatcacgtggtgcagcacttagctgatgtaacctattctcttgccttggctctgcccatagaaggcattgtgatgtattgccaggcccttcacccaggttatgtgatttctgcctgtgccctaaccacattggctatattgacatattgcactgtccgatacccaggtgatgttacttttctgcctgggcccttcctacaggggacattataaaatatctctgtgcccatcacctatgtgttttgactttcttctcctgcatggtttctgatcacaggaggaaatgggacatatccctgggctcagcacccagttgatgtgactcttccttttttttctatgttctgctaacacaaaagatactgacatattgatgggcccaacaccaaggtgatactactctttcactttggccctaccctcagaaggcatggcaacatattgctgggcccaaagcaaaagagatttgagtcctttgcctggaccctccttgcagggggcattgtgatatatctctgggtccattgactgtttgatctgagtctcctctctttcctgggctttgcctatagtagacactatgatgtatctctgggctgtgcacccagctaatttgacttgcctcttctgtctgggccatgactacagataagagtgatttatcaggacccagcacacaagtgatgtggttcttctgcctgctttctgcccacaggcatcattgatacatacctgtggtcccaaaaatgcagataatgtgactcttttttagggcgggaagggatatgtccacagtggggattttgacatattgcttggcacagcatttatgttacttgactctcctctcatgcttaggctctacccactggggtaattgtgacatatatctgggtgcagcccctaggttttatggctatcctcttttccatgatccctactcatagcatacattgtgacatatctctggttttctcacctagtttatgtgactttcttgtctatgcccttccatcacagggtattgtgacatattgctaggcccattatctagatgatgtgactctctttgcttgcctgtgcaccacccaaaagggacattgtgacacatctctgaaccaatttcctacataatatgcctcttcattgctgcctgagaaatgcccccaaagaggattgtgacatgtctctgggcccagaacctgaatgttgtgactctcctgccttgacatagaggaaatattatgatatgtcactcggccctgcacacaaatgatgttactctcctgcctgggccttgcttatagaggggattgagacattttacaggtgaagaattcaagtgacatcattctcatttctcagcctttcctgcaggtaagattgtgacatattacttagcccagcacacagatgaaatttttccgcttgtatgcaaacccagccaacaggggctattgtcaccataacacatgaataaagaccactgttgaggtcctgaatcttatatgtgaacacatcaacagttggaatcgtgactgtcatatgtatatcttgccgtaagtgggatggtgactcatttctggactcagctcacaggaatagtgatgactctgatacctggaccaagccagtaagagagatgttgactctggggtcaacctagacttaggggtctgggtcttttacttgtaggaaggcaacagaagattatgaaacttacacatatggtataaagctcttggggaatacagagtgtcattacagggcccagtccacaggtgagattgtaaccctcctatatacatctggccaacaatttgaattgccaccttcacatatagaccgagcccattgctgaggtcctgaatctcacacataaacctatttcaccattgaaattgttactgtcatatgtggattcagccacaggttggatgatgacaaatttctgaacccaacccacttgcacaatgaacccagccagcagaagatgtgttgattttgaggcttagggcaagaagcaaggttttgtgtttctcacttgtatgaaagtcacagaaaattttcaaactcactcatgttgtataatgccctcaggttgtacggagagtgtcattacataactcagcacaaagtggagattgtgactctcaagcgcacaccaagccaagagtaaaaattgtcatagacacacatagacagaacccactggtgaggtcttgaatctcattctcagatgagtctacagtttgaatttttaatgtcatgtttggatccagccacaggtgggagagtgactcatatctgaacccaactaagaggcacagtcatgattttcatacctggacccagccaatatgagaggtgttgactctcatacctggacttaggaaaagaggtaagatcatgagtttataccagcaccaatgtctcaaaggggattgtgactcttgcccaaacaatgcaaagccctatggaggtaaagagagtgtgataagaggacccagaacacagctgaaattgtgattcttatatgcacttccagcccacagtaaaaagtgtcaccctcccacatgaatagagaccactgatgagcttctgaattgtacatctggatgcagttgaaagctggaattctgattctcgtatgtgcattttgtccagaggtagatgatgactctaggatcagggttcatcacacaggtgaggctttggctctgatatcaggacacagcctgcaggtggaattgggactctcatgcatgaatctagtccatcattgagattgtgactcatgtacttggatgcaactcacaggaggtgttgactcttttacctgaagctgggacacatgtggaattgtgaatcttagccctggaccttcccacaagtgttgtgacatatactttggcctagcacctaagtgattttacttccctgcctggacccagccctcagaggggattgtgacagatacctgggtcaaacacctaggtgatgtgactctcatgcttgagccctatccacagagggtgctgtagaatatcactgggctcagtgcttaggtcatgtgtatcttattttcagccagggccctgcccacagagccattgtgagatatcactgagcccagcacctccgtgatgtgactgtatggcctgggccctgcccacagtaggtattgtgacttacctctgaactcattacctaggtgatgtgactttcctcttttgcctgcattctgccccctcaaaatggcctgtgacataccacaggtcttagcacttaggtgatatgattctcctctgctgcctgggccctagccgtaggagagattgactcattttactgagccgagattgcaggtaatgtaagcttctatcctaggccctgcccacaggaggtatggtgatatatctctgtggccataatttaggtgctgtgactcttctattctcttcaggccatgccagttgagggggattgtgacatatcgttggaccagcacaagggaaattgaaaactcctgcctaggccattcccatagaaggcattgtgacatatcactggtcacagcacacaggtaatttgactctccttcctgggccttgcccataggagatattgtagcatatctttagcccagcacttaaaatatgcgaccctcctagttggtttcttttccacaggtgagaattttacataaaactgcacccagcacacaggtgaaattgtgactcttggatgttcatccagccaacagttatgagtgtcatcatcgcacatggacagagaactctggtgaggtcctgaatcttgtacacggacatagtccacagttggaattttgactgtcatgtgtagatccagccacaggtgtgatgttgacctgtttatggagttagctcacaggcacagtgagaactctcatatcttgacccagtcaatagaagagatgctgactcttatagctaggcttaaggaaattaatagggtcctgggtctcctacctgtatgaaagtcacagaagattatgacactcatgcatattgtataaagccctctggtggtatagagattaattaacagggcccagcacacaggtgagattgtgactttgttatgcagacaccgctgacagtaccatcaccctcacatataaacagagcccactggtgaggtcctaaatttcatgccctgacacagttcacagttgggattgtgactgtgatatttcaatctgatcacaggtgagatggtgactcatttctggatccagcttagaaaatagtgaaggctctttcacctggactcagccaaatggagagacgttgactctgttaactaggcttagggcagcacataaggttctaggtctcctgcttgcataaaggtagcagaggattatgacactatacatattgtacaaagtcccccattggtcctgagagggtcataacagggtctggcacacaggtgagactgtgactctggtatgcacacaggcagagtaaggattatcaacctcctacatggacacagcccactgttgagattctgaatctcacaaccagaagcagtcaaaagttggagttgtgactctcataggtggatgtggtccacagctgagatgatgacctcagaccaggaggcagcacacctggaggctgtgactcctctaccgagatgcagtctgcaggtgtgattgtggctgtcatgcacaaatccagtccacctttgacattgtgacacccttactgagacccagttcacaggaggagttcactctgatacatagagctgggacatgtgtgggattgtaaatcatatcacttaacctttctgcaggtgtgattgtgatatatagctttgcccagcacctgagtaatttaactctcttgtctgagcctggcatacagttaggatcttaacatatacctgggccaagcacctaggtagtgtgacttttttttgggccctgccctcagggataattgttacttatcactaagttcagaacctagtgatgtgacatttctctactgtcttggtcctacccacaaaataaaattatatcactgggcccagcatctaggtaatgtgcctctactctttttcacaggccctgtttacagtgggctttgtgtcacatacatgagccctgctcaaaagcgtgatgatgattctcatacataaacccagctgatagaagcaattttttactcacatagtgaggggtaggacaacaaacaaggtcttgtgtcttttacttgtacaaaggtcacagaacatttttagctcacccatgtgtcatacagtcttaaggtagtagagagagtgctgatacaaggcccacctgaagatgagattgtgactctcctatgcacacctcgctgaccattagaatcaccacattcaaacatggagagagcccactggtgacctaaattttacatgccgatgcagtctgcagttagagttgtaactgtcatatatgcatttggccacaagtaggatggtgattcattattggacccagctcacaggcatgatgatgaatcttgtatctggaatcagcaaaaaaaaaaaaaaagatatattaattcacatagctaggcttagggcaaatggtaaggtcctggttcccctacttgtatgagggtcacagaagattacaaacatgtttataatataaaggccttgggtggcacagagagtgtcacagcaggacccagcacacaggtgagattgtggctctcttaaacacacccagccagcagttaggattgtcaccctcaaacaggaacagagcctactggtgaggtctagaatctaaagtggaaacacggtccacagttggaattatgaatgtcatatgtggatctggccacaagttagatgttgacacatttttgaacccagctcacagtcacagggatgactctcatacctggactcagccaataggagatatgttgactctcaggcttagggcaatgggtaagatcatgagcttatatcagcactatatcttataggaaatttcaattcttatgcatcctgcataaagctctggggtggtatagattgtgtcataacagggctcagcacgagtgggattgagacccttgtgtgcacatgcagccaaaagtaagaactgtcaccctctcacatggacacagcccactgttgaggttctgaatctcacattcaggggtattcaaaagttggaattgtgattctcataggtagatttgattaacaagtaggatggtgacaggtaggatagttaggattgtatcttcaggccaaaatttatcacacctatgaggcagtgactgcccccactgaaacactgtccagagttggtgttggctttctcaggcactgatccagtccatggttaaaaatgtgattcacattcttgaacataactcacaggagtagttgactctcatacctgaagctgggacaagtgtgagattgtaaatcttacgtctggaccttcccgcgggatgatcgttacatatatctttggcagagaactgatgaattttgctctcctgcagaagccctttctatagttgagattttgacatacaccttggtgaagtatctagaatatgtgatgctcctgcctgggctctgccctcaggggggattgtgacatatctccaggacatatatgtaggttatgtgcctctccaatcctgcctaggctgttcccaaaaaaggcattgcgacatgcctgaacccatcacctatgtgatttgactctttttttcccctgggccctgccctcagtggggattgtgacatgtcactgggcccatcatttccatgatgtgacttttgtgttctgctttgaccctgcttgcaggaggattgtgacatataactaggcccagcacctgggtgatgtgactctcatttcctgcctgtgttctgccaacagaatagattgtgacatatagctgggccaagcacccaggtgatgtgactcctgcctacagtggccattgtgacacatcttcttcctgggtcctgtttatgagtgggattgtaacaaatctttggccaagcaccaaagtgatgtgactctcgtttggtttctgctcacaggaggtattgcgacatatatctaggccaagtttagaggcgtaatgatagccctcatacgtggacccagttgatacaggagatttggcctctattttctaggcttagggcaatgggtaaggttctgggtgaagaagcataaggttctgggtgaagaaaggtcacataagattatgacaagcatattctctaaagcccttgtgtgacatttagagattacaggatccagcacccaagtgaaattactactcttgtagacaaacccagctgacaattaggattgtcaccctcacacattgacagagccactggtgaggtcctgaatctcacaggcacagtccacaattggaattgtgactttcgtatgtgtactgggacagttgatatggtgacttatttttggagccagcttacaagcactgtgatgactgtcataaatatatctgaccaataagagagatgttgacacatacctggtaatagaacaatgggtacgatcattggttcacaccagcatgaagatctcaaagcagattgtgactgtcgctcataccacataaagcccttgggtggtacagagagtgtcataacaggacccaggacacaggtgaaattgtgactttcttatgcacactcagccaacagtaaacattgtcaccctcccaaatggaaaccatccactgttgaggctgtgaacctcacatgtgcaggtagccgaaagttggaattgtgactttcgtgaatacatcttgtccacaggtaagatagtgactcaaagaccaggattcagcatgcctgtgaggctgtgactcgtatactgagaaacctgcatttagaattgtggctctcatgcagggatgcagtccactattaagactgtgactcatgtacttagacccaactcacaggaggtcttgactctcatacctggagccagaaaatgcgtgaaagtttaaattttatttctggatcttttgctggtgtatttgcaatatatacctttgtccaatgcctgaaatatttggtcctcctgctggggaaaagcctgcaaatggaattgtgacatatacctgagccctccatgtaagttattttactctactgcataggtcctcaggggagattgtgatatatcactgggcccatcacctaggttaaatgattatcttctttggctgggccctgccaacaccaagagttgtggcatataactggacacatcacttaagtaatgtgactctccttttctgcttgggccctgtacacagggtggattgtgacatattactgtcacaatactgtgtcccgcacacaggaaatgtaacttttctaactgaaccctacccacaagaggcattgtgacatactgttaggcccagttcccaggttatgtgacttcactgccatggccctgcccagagagtggatattgacatctttttggtccagcattcaggtgatttgattatcttgcctattccattctcacaggttaaatttcaaactatgcgtgtttcccagctcacaggcattatgcccatgctcatatagaaaaccagacactaggagtgattttgactctcttagctagattttgagcagtgggtaaagtccgaagtctcctacatttagaagggtaacaaaagttgataaaatgtgtgcatattctataaatactttgagtaatatagacagtataataagggcccagcacatagtgagattgtgactctcataggcataccaagccaacaattaggatcatcacttccaaacatgacagtagcacactagtgaggtcctgaacctcacatgcaggtgcagtccacagttaaaattctgattgtcatatgtggatctgagaacaggttgaatagtgactgatttccagacttagctcagaggcacggacttgcatacccagacctagccataggagatatgttgactctcacaggtagccttaaaacaatgggaaaggtcctgggctttctacttgtatgaaggtcacaaaagattacaaaactcatgcaaattttatgacccccttgtgtggtacagagagtgtcataacagatcccagcacaaagttaaaattgtgattctcataggcatacccagccaacagtgaggattgtcactctcacacatcaacagagaccactgacgaggtcctgcatatggcatgtggatgcagtccacggttcaaattgtattgttcacactcatctgtcactgggtgctgggttcatgatatatgcattttgtaaaaatttataaagctgttattttataatatatgtgctttttatgggtgtaaaattaaaaacataatttttgatttttctatttatctcatgtttcttccacaatcaatttttgtcacatacttttctggaaaatagataatttcatctaaattttcaagtttaatgtcatgacattttaaaaaatattatgtttgaatcttgaatgtatctctaaatatcctcttttgtcttttgtaaaatttttctcctcttgaaatagtttatctactttattattacattcaaagaacagcactaattttactcagatgttattatccctgagtaacaaatgagtcggagaagtcgagaaacttgcccaaggttacacaggtactctgagcctgctcttctaaccactgaacacatggtgtcatccaggaaacacatatgcaatactatttctaaaggtacataaaatcacattatacacatgcaaatatgtgtaaagataaaatgaacctatacagtgtttacctgcagaaaagtcactggttgagggtgtagaaggtcacatggaagaagccttctctgtttttactgttgttttgttgtttttgtagagataaggtcttgctatattgtctaggctgttctcaatctcagctcaagcaatcctcctgcttcagactcccaatgtgctctctgtcatatttttaaaattacttattgggtcaagtgtgctggctcatgcctgtaatcacaacattttgggaggccaaggggaaaagattgcttgagttcaggcatttaagacaagcctgggcaacatagtgagacctcatctcaactaaaaatagaaaaaaatagctgggcacggtggctcacgcctgtaatctcatcactttgggaagctttttcttcaaagattaaaaacaaatcttggtgtctggcagccaggtaaggtgagggcaggaggcagaaacttgcaatccatggggtgcgttggctttttcaacattatttttctccccgactacacagaaaatttcttcagtgtttgatcttatgcatctttgaatccaaacatctcattctttgccttatacatattaaaaatgtattcacagttcataaaacataatcaatctatcaaaaaatattccaaactaaaaacattctttttatagaacctagtaatgcaccttaattccttacaatttgtgttgagaattactagtattatgatgttttctaacatgtatcaagtacttttagatgtttagcacttgagatatattataaaaaccttctcaatattaacctgggactccaaagaatatgtatggcccaaacagttgttttcttcccaacaccaaggaatggcatacaagattgtcttcaagttgaggacaggtcataaagaaaaatttttaaaaagagaaaaaaaaatctgcaaacttgtttctacacatgggtcttacatacatttcttcatcaattatattaattctgaatgaaccatattacctgaagttgtacaaataattgcttcaaattgtagaatccccaggaaacagaaagaagcaaaagcaaacactcccaaagaaagttacatctattccagaccttgatgaaccttgcaaacaattttccattatgtgcaatgactagcaagcaagcaagcaaatatgacaaagttcacaataaataagatcgtgtgaaagacaccagaaaaaaaaaacataacagaaacaaatctgcaaagacatccaatattagaattatcagacacaaaaaatcaaaaacaactatgcttaccatatctaaaaaagacaaatgaacgtatatgcaggaaagaagaaactatataaagattctaaaaataagttgtaaaatgaataatacaataactaaaataaaaactaaccacatttgaacttacatgtacaagacagaaccagtaaactagatgctagatcagtagaaattaacacatatgcaacaaatatcagtgccagaaaaatatctggtaagtattctaagcattcaaaatttaaaactgaaaagcataaggttgatactatttaacctttctaaaaattagaataggtaaaaatactgcacaactcaattcctgagttaacatcaaagcttgacggagacaaaacaaggacaatgatagacaatctcattcataaagacaatttttttttgagactgtgtctcactctgatgccctggctggagtgcagtggcccaatctcgactcactgaaacctctgcctcccaggttcaagcaattctcctgcctcagcctcctgagtagctgggattacaggcacatgccagcatgcctggctaatttttgtatttttagtagagacaaggttttaccatgttggtcaggctggtcttgaactcctgacctcatgatccacctgccttggtcttccaaagtgctgggattacaggtgtgaaccatcgcacccagccaagacaaaaattttttaaaccaattacaaacaaagtgactctttctcggtataaaatgaataaaaccatcaataagtttatctcaagagtacaggataagttgaacattgtataatctacatgtctacataaaataggcacagaataagagcttggtaactagaaataaaagaatattttattttattttctaaatatacaaggtatttcaaataaagtacagcaaatgtacataactactgaaagtttgtcttttaatgtcataaacataataattatgttggtgttcaagatttttattaaacattgcatccatggtttcagccaacaggttaaaatgagaaatcagttacacaattatactggaaaagcagaactagtcaataaactaatagctaaactattggttctacctaggtagattggatccttgcaaagcaactaacacaaaaattgttcatgtatatcgaggatttaaaacttctaggagaggctcggtggggtggctcatacctgtaatcccaccactttgggaggctgaggtggcagatcacgaggtggggagttcgagaacaacctggccaattttatgtagcaagactgaaagttttataagagtaaagagcaatattttttttctccattttatctcctaaagctagcaagaagtatggcacaacgtgtgtgctcaacacacatttatcatttaaatgaataaatacatcccctttgtaaatggtcaagctatgcaaaccaagacttttttagttattattgtttagttgatagaatcaaatctaaggtaataaactgtaaaattcagaaagcactattaaaagtttgatgttacctcatcattcttaggtaaaatagagtaaaaattttagtctctaagtttgtgaccattaaaaaattaaattgccacgtgagaatgaaaaatgaactctcactttaggcgagcataatttgagaggaaaaggcgaaaaagaaaagaaaaactgaaaactcgattgggtcagatatgccagttctactctctctctctatatatattttggaaatagttccctcctctcctgacgcagagggaggctggctgggggatcctgggtccctctgtcctccccgcggtggcagtggctgatctctgctcaggcgtgaggggtgcggccgtgcgctgggcttgagcctgcccggcccagcccctcctcacttccctggactcctcacggtgtctacgggcccctgcacaatcctgagcgtccctctgatggaaggggaggtggcagcagaaagccagtgggagaaactggccccgcaggtcgaggagggctcggccagctgtgggaaatgctctggttgacctcggatttctgcgcactaagctgagccgcgaccccggctttgagccgaggcatccccgggctgggcgaccgtgggcgtgggcgctccggctgctgcggcggttcctgctgtgctcagctgggtcacgactggaactggcgccctccggaagtgaaggaggtgccccgcagaggaggcggtagccgtggtccctgtaaaccaggccttgctgacaaatgtcagacgccaagaacagaagaacggagagcttcagccaaatggaggaactgctggagcggctgagggtgaagctgcccaaactcctcaaagtggagcagcaaagcaaacaccagagaaggacaagaaaaatgaaagtcaaagaaaattagcagaaaccaaaggcagacgctaacgcagtgcaaaacagttcacatcatgatagaaagagttgatgagtctcggaaactaatcttagtgacagaacgaaaggacagcagtgaacatggtaaggtgctgacgattctggtccactggatcccaccatccctaggacagtaaataccatcacagtcaccacacagtgagttacaactgcaccatttcctgtttattcctaaatgaataaaggtgattctcaacacaagtgcaaataaaaagttatttgtttttttttaaactaaagtgtcatgctttagcttttttttttttgagttcttataattttgaaaatgaagttgacatttgtatggcttatgaagtttttgatagtcttgcattagttgaattgttcaaagtaagtatattttaaactaagaagagtcaattgtatttgttttacatattaaaggctcaaagtaacaaataatgtatctgtttatgatttgaaaagttcaaagtttgattatttatccgtacatacacagaatagtgtatcgtgctaaaacatttgttttttaaaagtggcagccatagttcctgcctgcctggatatattttggactttagtatgttaaagacaacgtaaaaaaaaaactttattatgttttagaaaatctaagattggtatacacaaactttacaaattgctgtagggttcagcaaactatgtttataatgtgacattaatacctctacattttgatgtgtaaatctttcttgagaaaagattgttttttaaaaaaatgtctacaaattcaggcttcagttataaaatgacaaaatagtaaagaaatgagtggtttgccgtatgatatgaatacaggcattcaattaaaataccaaatattttaatgaaaagtttttagacaatagacttaaataatttcttgatattttactacagtaataaatattcacaaatattttataaatcatatctattagtactaggttttacttaatagtagtatatatataagatcaaagatctgttaaaaatagatatgtttatcagtaatttggtgtttctaaatacccagaagtcttgttttaatcagattagctctggggatagtttactaattttattttataaacagtgtattcaaagttttctagtttaacctaatattgattgatgatgggtaaacaaatctcttcttgctaatcccataggtttattaaattgttgaagatatttttaatttaaaaattctgtcttcaatgttgtttacagggatttaggtctagtttaacctgctcaacctgttaatcagtgtaggtgccagattccaatttattttcagtgtgtttgtatgacttttctttctttcttttctttctttttttcagacagagtcttgcactgtcatccgggctggaatgcaatggtgcaatcttggttcactgcaacctccgcctcctgggttcacacaattctcctgcctcaaccccctgagtagctggtattacaggtacacaccaccacagccagctaatttttttgtatttttagtagagatggggtttcactatgttggccagactggtctggaactcctgaccttgtgatctaccactgccagcctcccaaagtgctaggattacaggtgtgagccaccgcacctgaccaactttggtctttgaataaaatgtctattaacaaagacaaatttctgcacatttatcaagttgcttgtagtaactcgaaacgtaatatatccaaaattctcctgttattgtctgagaaaacagattctactgttacctaaaaaatcaactggaaggcacttttataaccttgcaccacgtaagaaaaaaactgcaatgcagtagtaataagtgtagatacatcaaatgaaaaatggtaatcgagaatgtcactttcaatgtttgagtatttggactttggttttaaaaaatgtagtaaaatagagcttttggtaagctttctgtagattaacattatcataaattaggaaaaaatcctttaaaatgtaaataaacaaaaaaatacactgaacaacaacaacaacaaaaaactaagatccagcagtgcatacatatttgtccttattttgggagagtatgaaacagaccattgcatgaactttatacagatgttttgccacagtggcatactaataaaaatgatttatctttaatttgaattaacatgtccacatcttaaaaatactgctttgtactaagaataataaatgtaaaagtctttatacacaggaggatcctgatcctcaactaaacatatgtggcaacccattcctctgtttcttccaaactgaagcctgactaaggcttaaatatagagtgagagagactcattaacaggacatgtgaaacaaaaaaaatgagataggatggtcatttctaaggctcagcaattgcctgggggacctcaatataatgatatcaactatgagtcttactgggtaaaaataaacataaaaagctgagaacatcatgactttaatttggtggaatagagtctctggaattatacacagttgtgctaaaagtattgagccagaatgatatgtatctgaggattattaaagggaatatttacaaacacaaaagtatttgttccatatcttgttacagtagcagtactcttgtctgtaatgtcagcttccccaagctacagatgccatagacaaactaagacttagtgtctaatatgttgtttgcagttagtttctaaatttaaaaaacttgcaataattttatgaatttcattaaatgctgtttcatgtataaatctcactaaaaggcactattcagtagatatttccctcagtcttttctgggattttctgctccttgtttccaaaccaaccttatttgaatcctaggcatttctgaagcccaatatgtaataacagaaagaaagcagaaatgaagccaagttaccccaaccagtccatgcctaatatatttggctccccaaatgaaccaaaaaccacacaagctaaacaacagtggatttaaaattcaacctaaattcaacagtagttgtcaaaatcatatgcaaaaattagcaaagtcacaatgtagaaacccttaacctgttattccacaacaaatcatcaaattcttattttggcatttttagaaaaaataaatatattacatatgacaaaatatacccactcacttataataaaatattttgaaatatgcatggttttattcttattcttaaatatatactatattatttagacaagactttcagtaaaaaatacttacagctaccgtgtatgaattaaaacagctatgggaaaataggatttttagttaataatgaagattgaagctccaatgatgtaaagtattgtttcccgggcacacagctaattacccaaatcaagctgaaatatgtttgatttaaaaattttaattttcccactgttgacaatgttgacataacagctaaatcttagtctcagagctggtagtttggaataaatcaagacaagtactattgaggaaggatgggtagtcaagaaagtgactatgtctttgggatgcagcaaacatggccattgtacagtggctgcatattgccaacacaataagccccagcattcgcattgtattccagcttattcaagcaaagctctctccaatagagaaactcccctgtaaacagcatgcacattttgattttacctttcctcaaactgaccttttactcattataatagtaaaaagcacacctgtgggtggagatttaagatgctagtgagatgtgaaaaatgaacaagcatgtacagctactgtgtccgtgcatcaagagggccatccagaacatgcttactaataacaccactttccacctctttataaataattatataagactcccataaaaaagtccctagttccagtctttgctttctcattccataagcaacacaccctgaatcccttctctctcaagatgtactgggtattctgcacctaacctttaaaatagacttactcctttgcaataaattactttatgctgcatcttctttgtgtttgtctcttgtttaaatttttttgaaactaaggcaacaactgaggtttcagaaaagccattcacactatcatgctttgttttgtattttttgttatcaacattttttctcttacatgtcaatattcacattttaaacacagtcaacactgctaaattgaaaatttaaatgaccacaaaataatttatcataaaagcatgtatatctctcatgtttcaccttcaccacactatctattcaactttttaaaaaaatttgatggtcaaatacatatatcaaatttaatattttatttaataatttgaattcaattccaaaatgatttatatggaagtatattgttatatttacttttgaccaaatttggctttccaagctaaggtaaaactaaagcatgttttcaatgtgttaaggaacttaaccttactagcattgagagacattagctagcttgccttaggtagatagcaaggcaagggtttatggagagcccccaacccccaggttagtgccttatccccacatagcagaaaaagcagcttggaaaaaaaaaagctccagacactgttaagggaactagcacagggggttgtgcctggactcatgccctcggatgcacaagtaggagaacctaaagcccatttagataaaaatttgcacacacctctggcttacttagataatggagcaaggcctgacatagaaatgtctgctctttgcatagtcagtgggctcccaggaaaaagttttttctttttgtgggcatgaacacagtgggctttgatgggttctgtggacactttcttttcttttttaactgtgagtctggtatttataaattattactttagcccttgattggtcgtgggccaaggtctttggccaagcttttgcatcagcttctaataggttctgggccaacatgagcagcctttatggatcattacttcagcccctgattggtctcaggccaaggccccaggcaaagctgagtcacacattctctaagacagctcacaaactaagcacaattttttcccattccagtttgtaaaaaccctggatcacagccttatagtggacaacccattcaggcctccctctctgctggagtaggacttttttctttttgcatattaaacttttgttccaaacctcacccttgtgtccacactccttaatcttcttgaatgtagcacaaagaattctgggtattatctcaaacaacagaggttgttacatcttggtgcactgataaaactataacatattttggtgtgttggccagggagaaaggaattcatcagaagggtgattaggagtgagggtcattgtcctcagttactttctgaggcttcttgtcctaagtttttgtctcttagagacaaacctgaaaacattggctctgttctaatccagtttcctttcacgaagggcctacccattgtgtggaacagaaaggaggtcctatggcaactgaaggtttctggttgagtctatacctcagtgttacctaaaagcccttggaccaactccagtccccaacagccaatgaaggtgttggcacaagaacttccagtcttttttttttcatttcattttttttcttcttcttcttttttttggtacctataatttctcctattcattctttgtatgcaatgttgtgaatgtttttacagcctatggatataatcatgctgagtaaagtcagtcagtgtcttagtcatcagatatgtaactcagagttgttgttttataatttcctagcaacagggcgaattcaaaatatctctaaatttttactcagtaagggcctttctctcccacagtaatacagtaataaacattcatggcactgtatgagagaatatttcaccctgagtaaataccctcctttgcatttgatttgtttttttctctccatgtgaaagctcagcactatccaatgaatctaaacagttcctttatgagacaagttcatttttgtttgttctggggcatatgctataggaacagcctatcaaaacccaaacctccttctaacttttgcctaaaaatataaagttggagtttttacctaggatttctaattttacagcacccctagtggaatgggattgttctccataggaagccttgtcaatgctccctccaaaacttacagtcccccaattattttcccttttacatccctttatcactgataaggcctcatgccctatttctaaacagaaaaactcaactttcaacagctggaagaagccatgctgacaaaacaaatcttcaatttttacacatttttaaggcacatgttcttcatcaaactacactggaatttgaacaaaaaggaattttatgttgaaggtaaactcatcccattctctgggattctgatgttttcctggggccatagcaggggaagccaaaaatggtattagggcattccctctataaaagtatcttgcctaaatccaactactgcataatctctccccagccactggagtaccttgagagtcttttgggctgagtggatctagaaaacgagcgggatggaaagctaggtgagaaggtgagcataacgtgtcctgccaacgagctcctctggacccatgggtgaaggtcatgctcgcatccatgggtaacatctatgatggtggctgggaaccagagggaaaaaaggaaggtcgagaagtggtatgccctttttctctttccgccacaccaaaaagagaaaggggactgaggaaagccttgtctcccctttttctagataggtaacaaaccgtctacagtttgcattcccctctagtgcattctgaaacactggaacctctttaaccctgaaactctaaagaaaaaatggcttatattctgtcgcacaaacccatggccatcttagagacaggaggcctggctttctaagggaagtattaatttcaacactacccaacaaatagatctttctttgccctgtgagacaacccagatctttgtaagcattgtaaaattaaatctgccctcttggcagccctacaaaatataattaccaaaagttgagatacaaacccttggggaaccctaaatgcaacttccaggtgcctcaccagcctcccatattttgggcccccaatacccatatatcatcagctcctctggttgtgccactgaagaaacccacataattgctgttgcccctacagaaaatgcccaataaacatggtgttactatgattcaagttcccttctcattgcaggaccttaagaaaataaagtgagccccaggaaagttctctaatgaccctgatacatatatagagtctttccaaaatttaacccaatgtttaatgttacatggagagatgctatgctgcttttaagccaaaccctaactgttaagaaacaagtagccttacaggcagcaaaaaaactcaaaaaaacaaacagtaggttacctagagccagtcagaaaagaaactcagttgaaagggaaaaaagagacagaatccccattcccaatgagaataaaaacaatgacccttaaatattctaattggagtccttgtgatcctatggagaagtggaaaagaaaacacttcctgatgtgcatattagaaagcttgcaaagaaccacaatcaagcatgttaattactctaatctgtccctgttaaatcagaaaccagataaaaatcccctggcctttttgaaaaggctgagaaaaactttagtaaaacaaacctccctgtgttctgatatgacaaaaaaggtttattacttaggcaggctctaatatcagaaggaagttgctaaaacaggccctgttcaaacatatttctaggttttgtcatccttaagttgaaactttgcagtatttaaataacactgttctctgtgccccaactgaagaggtctcaggaaggcactaagactttcctcaatttattagctgaaagggaatatagggcctcaaaatttaaagctcagctctgtcaaactgcagtacagtagataggtctagtcagaagatacaagaacaccggataaagaaagaattaaactcattttcttcttttcctttcccaaactcattggggggaccttacacattactggtttttgcaaactctgggtacctaggaatgttaaaatagccaatcttttataccaccttattaaaaaaactcaagcacctaaaaactcactcgctaacttgggaacctaaaactaaaaagcctttaaccaactaaagcaagccttacataaagcaccaaccctcagtcttcccataaggaaggcatttaatctctatgtatcaaaaaggaagttaatgaccctgggagttttaactaaggcttaaggtccagctcaacaaccagtgggttacctaagcaagaaacttgacttgatggctagaggatggccagcctgcctctgagcagttttggtgatggcttgctggtatcaaaggccacgaggttaacaatgggaaataactatctgcattcccacataggactgctgtcctctaatggaagcctctgactaaaaaccacttcctgaaatatcaaattttgctgctaaggtgatctgcagtctggttaaaaacctgcccttgcctgaactcagccactttctcccagaggaaactaaagagcctaaacaggattgtaaacaggtagttgtgtaaactggtaaaagatataagaagaatcactgcttatattctctgtaaagttttaattaattaaataaacatttttaaagtgtactcaacttaatgaaaagcgaatatccaagctataagtatattcagaaagcctttctatttttatctatataaaacttgttttcctggaagaggattttttctcacttaactaaattacttttatccactctttcttgtcactgttgatgcaagcatagaaggccctaaaataacctctggtggcctgggactcctcaagaaaacaaaaaagccaccataaattgcattttaaaagatctctgctttttttcatgaaacccctagaattaaaagtaataagttcctctccaaatctgtctctttcttctagctatgcttgtttattaggccctggaaactatatgcctagccctgttcttttttttttttttttatgcaggacagagtctcactctgtcacctaggctggagtgcaacagcacaatcgtggctcactgcaacctccacctcctgggttcaagcaattctcctgcctcagcctcccaagtagctgggattacaggcatctgccaccacacccagctaattttttttatttttagtagagatggggtttcaccatgttggccaggctggtctcaaactcctgacctcaggtgatccacccgcctcagcctcccaaagtgctgggattacaggcatgagtcaccatgcctggcccctagccctgttcataaaaggcctcaaccagagaccaataatccaattagaaaactggcaaacaaaaaatcttatagttactgaatcttcttctgtttgtctagatggttatatacgtgttttgtgtgatgtctataaaaaacctctaattaattggtgtacaaataagcacttagataaaatgttaagtcaaaattaaaggctgtagtgcctcttggttcatgcaacttcaatatttaagaaataaaaacattcttgtagaatacaaacatcttaaacatgtaaataggtggtctaaattatgcaggtcaaatattaggtttgctaaatgttttaatgtaaactgcttctttggcccttgagtactgtcaacctgccagcttcacaattagtaaggcctagtgacatattaaagtaaccatgcccctaactatactggaagaagtcagactttatctgctcctagcacataattaaaaccacttaccaggttttacattaaagttaaaattacaaaaagttaccattataacatgtaattgaggctactgaaaatgaatgtgtatgcaacgtgtgtaaaaacagtaaaattttataataaaaaattataagaaggcataaaaatctacatttttcctaggagtaaaagattgtcttaaattaaataaagtgaaagttttaagcaaatttttgaaataccaaaaaattaattttgcaaaagaatactctgtgtaaaaatattaactaaattcaaaggaatatcatatggtgttccttaaaattaagcatttaatgaaagcacaacaaagctttcttaagatgctcatctgtacatatcaaaatttctaaaagattataaaagatttgtaaaaatcggagatccattccaagatggccaaataggaagagctctggtctgcagctccaaatgtgattgaagaagatgatgggtgatttctgcattttcaactgaggtacatggctcatctcactgggactggatggacagtgggttcagcccatggagggtgagccaaagcaggacagggtgtcacctcacctgggaggcacaaggggttgggggatttccctatcctagcctggagaagccaggacagactgtacttggaaaaatgggatattcccacccaaatgctgtgcctttcccaaggtcttagcaaccagtagacaagaagattctctcccgtacctggctcagcaggtcgtgaacccacagagccttgctcactgctagcacagcagtctaagatcagatggcaacgcagcagcctggctaggggaggggcatccaccattgctgaggcttgagtagctaaacgaagtggccgggaagcttgaactgggtggagcccactgcagttcagcaaggcctactgcctctatagactccaactttgtgagcaaggcatagctgaacaaaaggcagcagatagcttctgcagatttatatgttcctgtctgacagctctgaagagagcagtggttcacccagcatggcatttgagctctgagaatggacagactacctcctcaagtcaatccctgacccccatgtagcctaactgggagacacctcccagtagaggccgacagatacctcatataggtgggtgcccctctgggacaaaccttccagaggaaggatcaggcagaaatatttgcagttctgcaataattgccattctgcagcctctgctggtgatacccaggcactcagggtatggagtggacctccagaaaattccaacaaacctgaagctgagagacctgttagaaagaaaaccagcaaacagaaaggaatagaagcaacatcagcaaaaaggatatacaccaaaaccccatctgtatgtcaccaacattaaagaccaaaggtagataaaaccacaaagatggggagaaaccagagtagaaaagctgaaaattctaaaaaccagggcaccttttctcctccaaaggatgacagctcctcaccagcaatggaacaaagctggatggagaatgactttgctgagttgacagaagtaggcttcagaaggtcggtagtaacaaacttctgagctaaaggagcatgttcaaaacaaacacaaggaagctaaagaccttgaaaaaaggttagatgaatggctaactagaataaacagtgaagagaagaccttaaatgacctgatggagctgaaaaccatggcatgagaacacgatgcatgcacaagcttcaatagccaattcagttaagcggaagaaagggtaccagtgattgaagatcaaattaatgaaataaaatgagaagacaagcttagagaaaaagagaaagaagaaatgaacaaagcctccaagaactgtgggactatgtgaaaagaccaaatctacatttgatacgtgtacctgaaagtgatggggagaatggaaccaagtaggaagatgctcttcaggatattagccaggagaacttccccaacctagcaaggcaggccaacattcaaattcaggaaatacagagaatcccacaaagatattcctcgagaagagcaactccaagacacataattgtcagacttaccaaggtaaaaatgaaagaaaaaatgttacgggtagccagaaaggtcaggttacccccaaaaggaagtccatcagactaacagtggctctctcagcagaaatcctacaaaccagaagagagtgggggccaatattcaacattctgaaaggaaagaatgtcaacccagaatttcatgtccagccaaactaaacttcataactgaaggaaaaataaaatcctttacagacatgcaaatgctgacagattttgtcaccaccaggcctgccttacaagagctcctgaaggaagcactaaacaggaaagaaacaactggtaccagccactgcaaaaacatgccaagttgtaaagaccattgatgctaggaagaaaccatcaattatcaggcaattttgttgatcttttcaataaaacagctcctggattaattgattttttgaagggttttttgtgtctctatctctttcatttctgctctgatcttagttatttcttgccttctgctagtttttgaatgtgtttgctcatgcttctctagttcttttaattgtgattgtagcatgtcaattttagatctttcttgctttctcttgtgggcatttagtgctataaatttccctctacacactgcttaaaatgtgtcccagagattctggtatgttgtgtctttgttctcattggtttcaaagaacatctttatttctgccttcatttcattatttacccagtagtcattcaggagcagcttgttcagtttccatgtagttagcagttttgagtgagtttcttaatcctgagttctaatttgattgcactgtggtctgagagatagtttgttgtgatttctgttcttttccatttgctgaggagtgctttacttccaactatgtggtcaattttggaagaagtgtgatgtggtgctgagaagaatctatattctcttgatttggggtagagagttctgtagatgtctattaggtccacttgttgcagaggtgagttcaattcctggatatccttgttaactttctgtctcactgatctgtctaatgttgagactgtggtggtaaagtctcccattattattgtgtgggagtctaagtctctttgtaggtctctaaggacttgctttatgaatctgggtgctcctttattgggtgcatatatgtttaggatcattagcttttcttgttgcattgatccctttaccattatgtaatggccttctttgtctcttttgatctttgttggtttaaagtctgttttatccgagactaggattgcaacccctgctttttttggttttccatttgcttggtagattttcctccatccctttattttgagcctatgtgtgtctctgcaggtgagatgggtttcctgaatacaacacactgatgggtcttgactctttatccaatttgccagtctgtgtcttttaattggagcacttagcccatttacattgaaggttaatattgctttgtgtgaatttgatcctgtcatggtgttagctgttgattttgctcattagttgatgcagtttcttcctaccatcgatggtctttacaatttggcatgtttttgcagtagctggtaccagctgttcctttttatgtttagtgcttccttcaggagctcttgtaaggcaggcctggtggtgacaaaatctctcagcatttgcttatctgtaaaggattttatttctccttcacttatgaagcttagtttggctggatatgaaattcttggttgaaaacccttttctttaagaatgttgaatattggcccccattctcttctggcttgtagtttctgctgagatcagctgttagcctgatgggcttccatttgtgggtaacctgacctttctctctggctgccctcaacattttttcctccatttcaactttgatgaatctgacgattatgtgtcttggagttgctcttcttgaggagtatctttgtggcgttctctgtatttcctgaatttgaatgttggcctgccttgctgggttgggatagttctcctggataatatcctgaagaatgttttccaacttggttccattctccctgtcactttcaggtacaccaatcagacgtagatttggtcttttcacatatttccatatttcttggaggctttgttcatttctttttactcttgtttctctaaacttttcttctcacttcatttcattaatttgatcttcaatcactgataccctttcttccacttgattgaattggctactgaaacttatgcatgtgtcatgtagttcttgtgccaaggttttcagcttcattaggtcatttaaggtcttctctatgctgtttattctagttagccatttgtctaatcttttttcaaggttttcagcttcattgagatgggttcgaacatcctcctttagctcggagaagtttgttattaccaatcgtctgaagccttcttctctcaactcgtcaaagtcattctccatccagctttgtttctttgctggtgaggaactgcattcctttggaggagaagaggcactctgatttttagaattttcagcttttctgctctggtttctccccatctttggggttttatctacctttggtctttgatgatggtgatgtacagatggggttttggtgtggatgtcccttctgtttgttaattttccttctaacagtcaggaccctcagctgcaggtctattgtagtttgctggaggtccactccagaccctgtttgcctgggtatcaccagcggaggctgcagaacagcaaatattgcagaatggcaaatattgctgcctgatccttcctctggaagcttcatctcagaggggcacccggctgtatgaggtgtcagtcggcccctactgggaggtgtctcccagttagactactcggggttcagagacccaattgaggaggcagtctgtccattctcatatctcaaaactctgtgctgggagaaccactactctcttcaaagctgtcagacagggacatttaagtctgcagaagtttctgctcccttttgttcagctatgccctgcccctagaggtggaatctacagaggcaggcaggcctccttgagcagtggtgggctccacccagtttgaggttcccagtcattttggttacctactgaagcctcagcaatggcagaagcccctcccctagccttgctgccaccttgcagttcaatctcagactgctgtgctagcagtgagtaaggctccttgggcatgggaccctgtgagtcaggtactggatataatctcctggtgtgccatttgctaagaccattggaaaagcacaatgttagggtgggagtgtcccgattttccaggtacagtctgtcacagcttcccttggctaggaaagggattaccccaaccccttgcactttccagctgtggtgatgtcccaccctgcttcggctcacactccataggctgcacccactgtccaacaagccccagtgagatgaacccagtacctcagttgaaaatgcagaaatcacccatcatctgtgtcactcacactgggagatgtagactggagctgtccctattcagacatcttgggacttctatcaactagttataaatattcttaacttgtagcaatatagctgtttgcatcagtgaaacaaaaatccattttctatttttgttttcttttgagacatagtctcactctgtctgtggccagcatgcagtggcacaatctcagctcactgcaacctctgcctcccaggttcaagtgattctcctgcctcagcttccagagtagctgggactacaggcatgcaccaccatggccagctaatttttgtatttttagtagagatggagtttcaccatgttggctaggatgatcttgaactcttgacctcgtgatctgcccacctcagcattccaaagtgctgcaattacaggcttgaggcaccatgcccagctgaaaaatccattttcttatgcaatgaaatacaacagaaaaacgctagttcttttaccaaggctctaattgggagggtttgttttcctttaagaaatcaagtttaagttgcaaagccagtaacagcctcttgggaaagctggtctcataccttgtctacacagtcctcatacaaaattcctggactgttgtgagtaaaaaaatgtcactttccaacagacttagaaacactatgctcttggaacctcaaaaatacaggagtttaaccaactcacaggtatttaagggtacaaatccatggcttggcccaactttataaagtcttatctaagatttcttttggaacagatttccatcaaagcctatcaaaaaggcctgtggagagatagttactcttgctgcactatgttcaaatagttaggccaagtataataataaagtctattttgcaaacaattcagtctattgtgagtagcttttttttaaattttattttattttattttattattattatactttaagttttagggtacctgtgcacaatgtgcaggttagttacatatgtatacatgtgccatgctggtgtgctgcacccattaactcatcatttagcattaggtatatctcctaaagctattcctcccccttcccaccaccccataacagcccccggagtgtgatgtttcccttcctgtgtccatgtgttcttattgttcaattcccacctatgagtgagaatatgcagtttggttttttgttcttgtgatagtttactgagaatgatgacttccaatttcatccatgtccttaaagaaggaattttgtgagtagtttctaacaaaaaaaaaactaaaagaaagtaattgtttcaaaacttgtcatacatttctcatgaacttctagtctcattcattgtttcaaacgttttgatgacattttaaacctacccggcttattcctgtaagccaaccagcaatctctgcctgcagctcatcaaaaaaagatagggatgggtaatgtaaaaatctaaatcaatattctagttctaagcaattattctgcaaatctggctgggtgatagaaataaataaggtgccaataacccagagctttcttttatcagaaagtaagatcaagggaactaaccaaagccaagcctcatgcacccaaatcttagcaaatataactatagctaccagttatcagggtgtgtcagcagcctcaacctttttaggtgtttcctgccctccttgtttcatttcaattcatgtcctctactaaaccagattgtttctttttccctaaaaactatcaagctccaagtggtaatgcaaatggaatgatgcataaacacatgtttcttctgagatacttaaaccagccctggaagaaatcttagctgctagaacagtacccctctccagtgaggaatagccaaaaatatcaatgcctattctccctaacagcagttagggtctcccctcctgagaggagactgagagggattagctagttagcctaaggtggacagcaagggaagggtccccagagagcccctaacccacgagtcagtgcctcataaccacttacctaccaagccaggcaaaatggcacacacctgtaatcccagtgactcaggaggctgaggcatgagaattgcttgaacttcggaggctgagattgctgtgaactgagatcacaccattgcactccaccctgggtgacagagactcagtctcatgattaaaaaaaaaaaggaactaatctttcatcaatattttaatagttttatgtctgagcacttaagcatcaaggacaggaccctggatgatgaaaagtgcatatttaaatttataaagtaaaaaatgaccatcagatactaataagtgatgaatacagcaacataatacttcacaaaatcattctgggtatgtttgacaaagaagaatgttacacagaaccttcttgtgctacccatgtgaagtgttcttctctctcactttagtctcaattcccaaccttacaattaccacatactcacatacacagaaaaagaaaaattaacttattttattagaaggccatgattcacattttattctattacatcttttccatatcgctgttataatagtgttgaagtgaaccctctttcaccagaagaatacctttgtgaatgtgaatagactgacactggagaagaccagctcagcacactcacttgaatgatccctttgtttttcaggcagtaaaaatgcctttgaggggggaaaataaagtgactgcggattaagcagacagctatacatggaaaaatatttgtcaattgtttgaagattacactgcatggtctacaacttttaaaatataaaatgcatagcataactattgcacaagaaaatagaataaaaatgatgcagttgaccacaaaggacagcaaagctgtattatagcaatatagaaaaatatatatctactgtcagaagaaggtaacttgaagtatttgagagatgttctctaagaaactaaaaatatgtttagttttagattctgtaaaaaatgtttcttaagcatttttaattttcaaaaaaatttgagctcatattttgtcagcttagtatttatgaataatttaaataaaatagagtaaaatacacattaaaaatagcttttctggtaatacagcagttgaatttttagattaaaaaagtaaaattctacaaaattatatgctgaccaatttaatcagaagcttctttcttacaactgtgagaaatgacacaaagattcaacttttatgttgggtgggagagaaaatgattaccaggggctagaaaattgttgtttcactaatcaatgttgatttttattgctatattgtctcaaattatgttaataataatgtaatggccttgatccaaaaaatgtttaaaaactttattgtttcaatcagccaaaatattaaccaaaagaaggcatagaaataaaggtatctaagtcataatttatagtataaaattaaaatgtttctagaaataaaaaaagagatacataagtaagaaaaggaaaaaaagtggattactcacaataactaaggtatgaaatcaacctaagtgtacatcaacaggtacatgaattttaaaaagtggtatatttacacaatggaatgctctttattccttaaaaagaaaaatgtcttagaggtgggctcagcactctgtgtcttagcaagccttgcagggactctgatgtgtgctgaagtttgagcgtcactggaatggatagtgtccatatgattgcagggtcaccccacctatcctgaatgtcaagaacatcctgaatgagaccagtcagtatattgtagctttttctccagccacaaccagaaagtctttgcttcccctttgccttccaccatgattgtaagtttcctgaagcctctgcagctgtgtgaaactagaaaaagatgcacactcaaaaacctcatttgaaatttccagacagaaagccaagcgtttggagagtctctatggacagttttaaacacaaatgcagaaaagaaagcaaccctattcagtgtgaagatgatgagaatgaagacctttatgatgatctacttccacttaataaatagtgattcctgaatccttgacacagcactcagctaccaatgccaatgaataagaatttgcatcacagttgaaatctgttcaccactccttttgtagatgttctgaattgtgtaccagaagtcaattgttattgggggaacccacccccaatatttcaacataggttctttctattttctgtaagtgtcagctggtctgagaaataaagagaaagagtacaaagagaggaattttgcagctgggcctccaggggtgacatcacatgtcggtaggactgtgatgcccacctgagccacaaatccagcaagtttttattaaggacttcaaaaggggagggggtgtacgaacagggagtacatcacaaagatcacatgcttcaaagggcaaaaagagaacaaagatcacatgcttctgaggaaatagggcaaggactaaaagcaaagatcacaaggcaaaaggcaaaattagcattactgatgagggtctatgttcagctgtgcacgtattggtttgataaacatcctaaacaacagaaaattgggttcgagagcagagaaccagtctgaccacaaattcaccagggtggggtttttttccccaccctaataagcctgagggtactgcaggagaccagggcatatttcagtccttatctcaatcacataagacagacactcccagagcggctgtttatagacctcccctgaggaatgcatttctttcccagggtcttaattattaataatccttgctaggaaaagaattcagtgatatcttccctacttgcatgtccatttgtaggctctcctcaagaagaaaaatatggctctattctgccctaccccacagtcaggcagaccttatggttgtcttcattcgttccctaaaatcactgttattctgttgtttttcaaggtgcactgatttcatattgttcaaacacacgttttacaatcaatttgtacaatactggtcctgaggtgacatacatccttagcttaggaagataacaggattaagagattaaagtaagacaggtgaaagaaattatgagtattatttgggatctgataaatgtccatgaaatcttcacaattgatgttcagagattgaagtaaagacaggcataagaaattataagagtgtttttagggaagcgataaatgtccatattacaatgaaatcttcacaatttatgttcctctgccacagctccagccggtccctccatttggggtccttgacttcccacaacaaattgtctcattattaagatggcttctaaagtgattcatttttgtgacacataataagtgttagctgaggtctagctgtatggtgaaaagggctgatgaaaaatgtctacagagaggatagtcaacttatattaactgtgagttatactaggagctatacttaattcatttagactttatttggtcagctttttttatatttcaaaaaaagaacatttttaaaaaattaagtctttttaaatatatattctgctcaaatcaccatttcctttttttctgatgaaaaggaatttttcatgatctttcagggattatattttctttcaccttctatctgcattctctttcttcagctaattgattaaaaaagagatgcaaagaagacacatttgcttctcatccacacatcacttccacttgctattagtcattgtgagtagagctgagaaaagcagttttctagcatgacagcaacttctcagaaataaacaacactcggaaacaaaactataaatcttttcaaaagctaatgtattttaagcaaaataagcagatgcatcaataataaaatgcttgtggtagaatcgatttgttgatttcaattgagttcagataagatttgaccaaaatctagcaaacatagagcagaaaaaggaatattatctgaaataaggatattgtaaataaagttaatttgtcaatagaaacaataatattatgacctcatgataatagtctcatctacggttataaaacatcaaatgctactttttattataaactgtatttcacataagtattctatttatatcatcctctttcactatttgaatgccttccccactttatatcagtggaaagcaggccagctgcttccaggaaagcaggcaatgctcttcttactttaacaatgatgatgaagagcacttgttttggtgatactcctgtgccaaaaactgttattttgcctgaagtactggttttctatttttctctatattagtaaaataaaattcttaaccaagaggaatttatctcatccaagctttatggaattttgtttacatttaggtgtctctgactttcctggaatattgaaatttttatgaatctaaattgagtactataaataaacaatcttttactaaaagactttttgaagttggagtgatatttataaaaacttttcataacattgaagaaatgttttaaccatgttcccagtaattactctgaacatagaattttccatttttagtattcgctctgagtcacacaggggaaattgatatctttacgaatgggcaaaaaaaggtgctgagtggaggtgcaacacattgcacatcaatgcttttcacatgcacctattagggtcttaatttaattgaactgtcatttgcatagctagacacttattgaatctagtcatactattttttagcaactaatgccatgtttgttaccctttagttttatacacttatttgcttggctgaaaaaaataagtcttctcttaatttactctaaattgagagactagatttacagtctggggctataatagtagttgaatgtttttaatagtattattggcaaatgttcaattcacattcagaatggatataaactttatgaaaagatagggagctgacaaagagtaaaaaatttcaaataggttaagtaagttttgagacctattgcacagcagggtaactatagtaaactataaagtattgcatatttcaaaataactaagagtaaatttcaaatgtaccaccacaaaaatgataggtgagttcatagatatgttactaaacaaaacttaattattccatattttatacatatactaaaacatcacactgtatgccataaatatgtgcaactgtgatttaccaatcaaaaatactactaatactttttttataagagagagtgaagtaagatttaagatattgcaccagagaaaaatgtggttgttcatcttaaaattttaggaaacatacacatatatacattttatttcaaatggcttgctcatttatagatgtaggtaagtaaactttaaatatcatgaacagtcagaacccagcactcagaaatagacttgatttttaatgttcaaaataatataatactttgaaagacagactctaaagcaactgtttagagtaaaattctctctaaatttttaaataaatgatttccttcacttgttagaaaaaaattttaatatatatttttaaactatactgaaatttatcaaattaacataaaagtattaaacaagtaaacaaaaaacaatatgccttcttctctctaatgaaaaaactgacagacactccgcatttaaccaaatactttggtaaatggattctaacaatgatatctctcatgacttaaaacagccactagttttaacttagaattatattaaatttttatattaaaatctaggattagcttattattacatagaaaatttgtggtctgcatgtacatcatcatccattgagtggtctatagtttctgagtttcagaaatgctaatataagaatacttcttccaattgaataatttaagttttctcagtgactaaaaaagattggaattactgatcactcacttacaatggggttttaaatgttatttaatgaagatatataaagtttcttttaaaaatcattctaacaacatttcttttgctttttcacttttgttagaaaataagtacgaaaatttatgttactacaagcctataaattttatttaaatctagacataatgctaatcttaaaagatctgtatgtttaagattatggatactctatttacacttagaagataaataactgctttccagtaaatcaaatgaggcaattttgactgtcaattataagctattaaaatattaatactatcatctggtagaaattttaggtgtctgtatgttcaggttttttagcatataataaatcagaaactataaatttttagaaactataaataatacactaaaataaagtatcactttcgttttgtcagttttgaaatactgtcatttctagatgaaataacaattacagaggctgtggctgttgaaattagaaatgtcatggttcattcttctttacttgctgccttttcatttcacacaaacacagcagcacaaggaaggcaagaaatgccacaccttgattgaaaacatgccagtgcccatctagggagaataaatgtctgagcatattcacttgaaattcatggcatcttttgttcaactacagactttcatatggaaattaataaagaaaagaatttcacactgcaatagcgtaagaaaagtactctaaaaataccttctgacccattatttctatttttcacaagaatgattgtgatggaatgagcatttgcagcactgtggtcttaaataacccccactttctgttgaattatttttggaatacaaccataagacttttgtgcttttttttttagaaaaaatgttttatatttctaattcagtaatttagcataatttttagtctcacccattcacaaatagttcattctgaaaaaaaaaatgattaatccaattacattttcccccaaaagagtacagtaacaaattaagtctatagtgtagtgtacagttaatacataaataataaaggtgtaatttgttttacttgcacacttgaaaataaaacactttttgggctatagactaagaaatttcaggttagcttataaaatgtgaggagacctggtatagaaacattcaccaccatgccttaaggggtgaaaaatttgtctttcacccctaatttcaactattaacccagcactggaaaaatagaacatgtcattataccaaaaaacattttattatttttattttatatttaaggtacatgtgcagatttgtaaaacaggtagactacatgatgttgaggtttggatacttaataattccattgcccaagtagtgtacatcatacctaagcagattttctatgcttgtctcccatccttcctccttctttttagaattctcagtgtttattgttttcatctttgtttccatgtgcgcccaatttttagcatccatgtatgagtgagaacatgtggcatttgtttttctgatgcaataatttgcttagaatggcctgaagcagagctgcattcatgttgctgcaaaagacgttacttcattctcttctgttgctgcatagtattggaggttgtataagtacatcatttttcttatccaataaaagattcatgggtaactggttaaattctgtttttgctattgtgaatagtgctgcaatgaacatgtgagtgctggtgtctctttggcaaaattatttattctttttgggggcagatatccagtaatcggcttgattggtcaaatggcaattctatttctagttctttgagaagtccccaaactgctttgcacaggttctgaattaatttgcattcccaccaacagtgtagaaagatttccttatctctacaacttcaacatcttatttatcttacttttaataagtcattcttactggtatgaaatagtatcacactgtcactttgatttacatctttctgataattaggaacgttgagcaatttttacatgtttattggcagctcttatgtcttcctttgagaagaagctggctattcatatcatgtttgcttttttattaaatgtattatagattctgtacattaatccttcattgtctgcagtttgcaaatattttatttcatactgtaggtcatctgtttactttgctgatagtttcttttactgtgcagaagctctttggcttagatgccattttttatttttatttttgttgcactcatgttagatgttagtcataaattctttacagaggccagtattatctaagtgttattctaagatttttgtagcttggagactcacagatcaagtctttaatctatattgagttgttttttttttatagaaaaaggtagtacagttttcttccacatatgactaaccagttttcccagtattacttactaaatagggagttaattccccttttgtttatttctgttggctttgtaaaaataacctgattgcaaagtatagcttaattcagtactctctcttccatttcattggtctagatgtttatttttgtaccagaaccatgttatactggttattctgatgcaatcttggctcactgcaacctccacctcccaggctcaaatggttctctttcctcagcctcccaagtagctgggattacaggcatgcaccaccacacctggctaattttttacatttagtagagatgcaggtttcaccatgttggccaggctggtctcaaacttctgacctcaggtgatccatccatctcagcctcccaaagggctgagatgacaggcatgagccaccatgcttggcccagatttattcttttagtctgaagttttcttggctatttgagctctttaattcttttgaatgtattttagaatagttttctttttctaattcaataaaaatcgtcatggatagtctgataaaaatagcacttaatctgtaggttgctttaggcagaatgaccattttaattatattatttgaatccatgagcaatatttttccatttatttgcattgtctctcgtttctttcagcaatgttttgttgttctttgtagagatattttacccccttgatttaatgtatttctaggtatttttttgtgtgtttgttgctattgtaaatagagctgtgttttttattttgttctcagtttgaatattattggtgtacagaaatgctatgcatttgtgctgattttgtattctaagattttttttgaagtctttttccaggcttagaactcttttggtgaaacctttaaagtattctaggtggacaattctttcatcagtaaagataatttgactttctttgttttctgtttggattccttttattctctggctaggatttcataacttcaataggactgtttagaatggatattcttatttttattctcatggagaatgcttccagtttttgctcttttagtatgatgttggctaaggatttgtcatagatgactcttattaagatattttcatcaatgtccagtgtgttgacaacatttttgagttaatattgggttttcttgaatgctttttctgcccctactgttatttttttttcttttaattatctttacatggtgaatcacacttattgacttccatatcatgaaacaccttcatatatatggaaaagctcacattaatgtagcaaaataactttctgatttgcttttgaattcagtttgctagtatttcatggaggattattattccaatattcacccagaatattgacctgtactttcctttttttgtggtgccttcactagattttagtttcatatatttcactgatttaatataacaagttagggtgaaatcccaccttgattttttcgaatgcattcagtaggcttaggtaaaactctttgcaatgtggtaaaacttcgctgtgatttcatatgatccagggctttttatggttagtaggtttattattacttatacaatgtcattatacattttatacatttttgctctgctaaagacttctgttattaggccaggcactgtggctcatgcctgcaatcccaggactttgggtggccaaggtgggcatatcatgaggtcaggagatagagaccgtcctggctaatatggtgaaaccccatctgtactaaaaatacaaaaaattagctgggagtggcggcgggcgcctgtagtcccagctaattgggaggctgaggtgggagaatggcatgaacctggaagctagaccttggctaatttctttatttctttttagtaaacatgtttagtaaacatttctttttagttccactatgttggcaaggctggtcttgaactcctgacctcaggtgatctgcccaccttggcatcacaaagtattggccacagtaagccaatgtgtctggaaaaaaaaaaaatctgtgttttgaagaaaaaagtatactttaaatttaattataactcttcaaagatctacttcttttaaagttatatacaaataattcttctttttgccaactttagttttggattttttcctatactcagcagtctgatttagtgtaatatctgaagtttgagtgacaggtatttctactgtgaattagctgatatttacataaacttaattttggattaaatattttttatatttactgtatctgcaaaaacatattttagtataaacgcatttgtgttttataatctgtagtttttgaaaaaatgtttttccaaatttattaaatttgcagggttattcttcaatataaattccctgatgttgagcaaagttggaacaactacctcaggttttcctgtagtacaaaatgtgtacaataaaatctgtgatacaagtacatgtactacaaccctcttaatatttataatgtgtttcctcaaaataaatattcttctgtactttaacagcttttattttctgaaagatctagtgacagtgattgcacttttaatacttttatttagtatgaactctctgatgtttaataagctgtgagaagatattactggcattaacaaaaatttttttttccagacagtctctctctgttgcccaggctagtgtaaatgctttcctttgcaataaggcatgagcactggttaaatgtttgtcacattgtttattacagtagttttctccagtatgagttatcttacctacaatcaagtgtgacagccacttaaaggctttgtcatattcttcacttttctaggatttctcatctgtacgatttcttttatattcagaaaagtctgaggtgttgccaaaagcattgtcacatctttcaggtttgtagagtctctcttgtgtatgaattagcttatgtctcttaagaattgaggatctattagaggctttcccacattcttcacacatgcatggtttctctccagtatgagttgtcttatatgtagtaagccttaaggactggttaagggcattgcaacattccacacaattgtaggaattccctccagtatgaattacatgaatgtttagtaaggattgaggaatagctaaaaggcttgccacattcttcagatttgtagggtttccctcctgtacaaattcccttatgttcagtaagcgttgagaattaattaatagttttgccacatttttcatatttgtagggtttttcctccagtatgaattcttttatgagtagtaaggtgtgaggaccagttgaagtctttatcacattcttcacatttgtagggcttctcaccagtatgaattctcttatgttccataaggtttgaggactggttgaagcctttgccacattcttctcatttgtagagtttctctccagcatgaattttcttatgtgtaggagggttgggaactgtttaaaagctttgccaaattcttcacatttttagaatttctctccagcatgaattttcttatgtttactaaagactgagaaccagctgaaggctttgccactttcttcacatttgtagggtttctctccagtatgaattttctatgataactgagggttgaggaccacttataggctttgccacattctttgcatttgtatggtttctctccagtatgaattaccttatgtttagtaaggattgagaacatactaaagcctttaccacattcttcacatttgtagggtgtctctccagtatgaattctcttatgttccataaggtttgaggaccagttgaaagcctcaccacattcttcacatttgtagggtttctctccagtatgaattttcttatgataactaagggttgagggccacttataggctttgccacattcttcacatttctagagtttctctccagtatgaattttcttatgtttactgaagactgataaccagctgaaggctttgccacattcttcacatttgtagggtttctctccagtatgaattaccttatgtttagtgaggattgagaacgtactaaaggctttgccacattcttcacatttgtagggtttctctccagtatgaattttcttgtgatatctaagggttgagggccacttataggctttgccacattcttcacatttgtagagtttctctccagtatgaattaccttatgttttgcaaggattgagaacataacaaagcctttgccacattcttcacatttgtagggtttctctacagtatgaattttcttatgataactaagggttgaggaccacttataggctttgccacattcttcacatttgtagggtttctctccagtatgaattaccttatgtttagtaaggattgagaacgtactaaagcttttgccacattcttcacatttgtagggtttctctccagtatgaattctcttatgttccataaggtttgaggaccagttgaaagctttgccacattcttcacatttgtagggttcctctccagcatgagttgccttatgttcagtaagtcttgagggccagctgaaggctttgccacattcttcacatttgtagggtttttctccagcatgagttgccttatgttcagtaaggcttgagggccagctgaaggctttgtcacattcttcacatttgtagggtgtctctccagtgtgaattttcttatgttccataaggtttgatgaccagttgaaagctttgccacattcttcacatttgtagggtttctctccagtatgaattaccttatgtttagtaaggattgagaatgtactaaagcctttgccacattcttcatatttgtaaggtttctcttcagtatgaattttcttatgataactaagggttgaggatgacttataggctttgccacatgcttcacatttgtagaatttctctccagcatgagttttcttatgtttactaaagactgacaaccagctgaaggctttgccacattcttcacatttgtagggtttctctccagtatgaattacctcatgtttagtaaggatggagaacatactaaaacctttgccacattcttcacatttgtagggtttctctccagtatgaattttcttatgataactaagggttgagggccatttataggctttgccacattcttcacatttgtagggtttctctccagtatgaattaccttatgtttagtaaggattgagaacttactaaaggctttgccacattctttacatttgtagggcttttctccagcatgaattgccttatgtgtagtaagggttgagaccttactaaaggttttgccacattcttcacatttgtagggtttctcatcagtatgaattctcttatgtttaataaggattgcagatcggttaaaagctttgccacattcttcacatttgtagggtttctctacagtatgaattttcttatgataactaagggttgaggaccacttataggctttgccacattcttcacatttgtagggtttctctccagtatgaattaccttatgtttagtaaggactgagaatgtactaaagcttttgccacattcttcacatttgtagggtttctctccagtatgaattctcttatgttccataaggtttgaggaccagttgaaagctttgccacattcttcacatttgtagggtttctctccagtatgaattaccttatgtttagtaaggattgagaacttactaaaggctttgccacattctttacatttgtagggcttctctccagcatgaattgccttatgtgtagtaagggttgagaccttaataaaggttttgccacattctttacatttgtagggcttctctccagcatgaattgccttatgtgtagtaagggttgagaccttactaaaggttttgccacattcttcacatttgtagggtttctcaccagtatgaattctcttatgtttaataagaattgcagattggttaaaagctttgccacattcttcacatttgtagggtttctctacagtatgaattttcttatgataactaagggttgaggaccacttataggctttgccacattcttcacatttgtagggtttctctccagtatgaattaccttatgtttagtaaggattgagaatgtactgaagcttttgccacattcttcacatttgtagggtttctctccagtatgaattctcttatgttccataaggtttgaggaccagttgaaagctttgccacattcttcacatttgtagggtttctctccagcatgagttgccttatcacattcttcacatttgtagggtttctctccattatgaattaccttatgtttagtaaggattgagaacatactaaagcctttgccacattcttcacatttgtagggtgtctctccagtgtgaattttcttatgttccataaggtttgaggaccagttgaaagctttgccacattcttcacatttgtagggtttctctccagtatgaatgacctcatgtttagtaaggattgagaacatactaaaacctttgccacattcttcacatttgtagggtttctctccagtatgaattttcttatgataactaagggttgagggccacttataggctttgccgcattcttcacatttgtagggtttctctccagtatgaattaccttatgtttagtaaggattgagaacttactaaaggctttgccacattctttacatttgtagggcttctctccagcatgaattgccttatgtgtaataagggttgagaccttactgaaggctttgccacattctttacatttgtagggcttctctccagcatgaattgccttatgtgtagtaagagtcgagaccttactaaaggctttgccacattcttcacatttgttgggtttctctccagtatgaattatcttatgtttagtaaggattgcagattggttaaaagccttgccacattcttcacatttgtaggatttctctccagtatgaattaccttatgtttagtaaggattgagaacttactaaaggctttgccacattctttacatctgtagggtttctctccagtatgagcactcttataataagtaagggttgaggaccagttaaaagctttgccaccttcttcacatttgtaggaattctctctagtataaattcttttatgttgagataggtgtgaaagcatgcaaaatgatctgacgtattctttacattgcaaatgtttctttccagtatgccttatcttatgtctgtttgaatttgaacatttatgaaagacatttgcatatttgccacgttgaaatactttgctctgtgtagttgtcaaactctggttaagtttattataaccttctttgtgcaccttacactcatccacattggtataaccaatttttaagtgtaaattctcatgtccacatttttcataccttctcaatatcactttttggaaagaatcttctatgccctgctctggccaaagatcttgagcaaaatgagaacatataactgaaaagaaataaaaatcacaaattagcctacttattagactcagataaatacagtttctaaatctaaactataaaattattcaaactacataagcaagatgacactgcaatatgacacaggccctaattcttcatagacatataaatctaataaaaacatatagaccgaaatacatatgtggataatttatacatgagttaagtgtgtgcagtgcctgaattaagctgaatgcagagtcacacagaaaaaaagaaaagtttgttaaatttacccagtacgactctttctgttcctcaatattacctagtaccttcagaactaaattgtcaacttctgtttgtgtttttttgttttgttttgttttgttctgtttttaaggaaagtaaaatattggcacaaaaaatttaatttatgtcttctacagccctttccacacactggtttctgtctcccatgacataaaatgctgaaagatatggtggtatacttagaaatgacagtttgagtctgctgagaccaaaggtaaatgcactgcagcagagcactgcagtcctgcagagagagaccagatgtaccaagtgattacttttcagaagaaagataaataatctctctcaactaaaagtaaatgcaaaacttcagacaagaaatctgaagatgtttgagaggcccacataatcttaacccagaccattgttttctgactatgccaggacaaagctacattataaattttgtgacaggtagcctttttaaatgtccaaatctcaaagattaaaatctatacaatatagggcaatataattccatcaaaaatattatacaattttcagaaagaacccattagcaatggatatactaattttaaaaactgaataacactcaatgagtgaaataggaacacaaaagtgtatagaaaatcagaaaaatgaggataagaacaaaaatgaccagtgaaatgtcaacaaaagatttgcagtccagaagaaaactgtgtgatatagtcaaagtccaaaaaaaaaaaaaaaaaaaaaaaaaaaagctatcaagtgagaataataccatcagcaactctgtcctgcctaatgggggaaaaaaaacaactttcaaaataactaaattcttaagaagtatattagcactgcatatgtcttccataagaaagatgccgaaagcagtttttaccactgaaaataacataatgtaagaaaacaacacctaatcatataaaaatacattattttctaggaaagacatgcacagacaaaaaattgaatttctagcattattctaatggtgcagaaaacatttttaattattctctaacatttaagagataaaagcataggaattattataaacatctgttaatgaatatacgacataaatcaataaacttagcaacatcggtgacaaatttaagagcagacataatagggaagaattttttatgcaaccaaagttaatttttcacctgattaaaatatattgttgtatttttaggttctatgcaatccccaaggtaccacacacacaaaatatctgtatacatacagaaaagaaaactaagatagtgaaagcatatccatacaaaaatcagacagaaacaaaggaagacagaaagagaaaatgagagacaagatgcaagaatcaaatagaataggtaataaaagtaactccttcactttcagaaaattatttaaatatatggaaagttaactttcaaatcaacagatatctaatagatttattaacatttattcttttgagacaaagttttacttttgttgcccaggctggagtgcaaagaccctatctcagctcacttgaacctctgcctcccaggttcaagtgattctcctgcctcagactcccaagtagctgggattacaggcatgcaccaccacacccagctaatttctgcattggtagtagagacagagttttaccatgttggccaggctggtcttgagctcctgacctcaggtgatctacctgcctcagcctcacaaagtgctgggattacaggcatgagccaccgtgcccaggctattaaaaaattttaaatatcaagatccaacttgcctttctacaagagtcagttgaaacctaatgttaaaaagactcaaagtggcaagatggaagtagacatttcatgcaaatattaatcaaatgagagcagaagaggtcaaaataatattacacaagctaaatcttaagtcaaagactcatattttataaaatgcactttacagtgaaactccaaagagacaaagaaagatattaaaaataatggattaactcagaacctgtgaaaacgttgaatacgtgtgtgtgtgtatcacacattaggattacaaatacagaaagcaaatactgacagaatagaagaaacacaaggagagcaatacaattatagtaggatattattacaccacactttctgtaataaaaatcaaaatagaggaggctgccaagatggccaaataggaacagctctggtctacagctcccagcgcgatcgacacagaaggtgggtgatttctgcgtttccaactgaggtactggtttcatctcattccaactggttgaacagtgggtgcggctccctgagggcaagccaaagcagggtgggatgtcgtctcccctgggaagtgcaacgggttggggaactccctctcctagccaaggtaagggtttagggactgtaccatgaagaaccgtgctctccagcccagatactgtgcttttcccatggtcttcgcagcctgcagaccaggagattccctctggtgcctatgacaccagggccctgggtttcaagcacaaaactgggtggccatttgagcagacaccaaactagctgcaggaggctttttttcccccataccccagtagtgcccagaagtccagtaagacagaaccgttcactcccctggaaagagggctgaagccagggagcaaagtggtctggcttggcagttcccacaaccagggagcccagccggctaagatccactggcttgaaattctggctgcaagcacagcagtccaagctccacctgggaagctcgagcttggtgggggaagggcgtccgccattgctgaggcttgagtaggcagctttaccctcagagtataaacaaagccacccggaagattgaactggatggagcccatcgcagctcagcaagaccagactgtatctcaagatgcctcctctttgggcagggcatctctgaaaaaaatgcagcagccacattcaggggcatatagataaaacgcccatctccctgggacagagcaccttggggaagggacagctgtgagtgcagcttcagcagacttaaacatccctgctggacaactctgaagagagcagtggaggtaccagctcagcatttgagctctgctaagggtcagactgccacctcaagtgggtccctgacacccgtgtctcctgattaagagacacctcccagtagaagctgatagacacctcgtacaagagagctctggctggcacatggcaggtggccttgggacgaagcttccagaggaaggaacaggcagcaatctttgctgttctgcagcctccgctggtgatacccaggcaaacagggtctagagtagacttccagaaagctccagcagatctgcagcagagaggcctgactgttaaaaggaaaactaacaaacagaaaggaatagaagtaacatctccaaaaggatgtttactcagaaaccccgtccaaaagtcatcaacatcaaagaccaaaggtagataaatccataaagatggggagaagccagtgcaaaaaggctgaaaattccaaaacccagaatgcctgttctcctccaaaggatcacaactcattgccagcaaagaaagaaaactgaatggagaatgagtttgacgaattgacagctcaaatttgacaaatttcagaggtgggttataacaaactcctccaaactaaaggagcatgttctaacccaatgccaggaagctaagaaccttgaaaaaaggttagatgaattgctaacgagaataaccagtttagagaacataaatgcctgatggagatgaaaaacacaccacgagaacttcatgaagcatacacaaatgtcaacagctgaatcgataaagcggaagaaaggatatcagagactgaagattaacttaatgaaataaagcaagaagacaagattagacaaaaaagaataaaaagaaatgaacaaagcctccaagaaatatgggactatgtgaaaagaccaaatctacatttaattcgggtacgtgaaagtgacagggagaatggaaccaagtaggaaaacactcttcaggatatcatccaggagaatgtccccaacatagcaagacaggccaacattcaaattcagaaaatacagagaacaccacaaagatgctcctcgagaagagcaaccccaagacacagaatcgtcagattcaccaaggttgaaatgaagaaaaaatgttgacggcagccagggagaaaggtcgggttacccataaagggaagcccatcagactaacagtggatttctctgcagaaaccctacaggccagaagagactggggggccaatattcaacattcttaaagaaaggaattttcaaccaagaatttcacatccagccaaactaaacttcataaatgaaggagaaataaaatcctttacagataagcaaatgctgagagattttgtcaccaccaggcctgccttacaagagctcctgaaggaagcactaaacataaaaaggaacaactggtaaaccagccactgcaaaaacataccaaattgtaaagatcattgacactatgaagaaactgcatcaactaatgggcaaaataaccagctagcgtcataatgacaggatcaaattcacacacaacaatattaaccttaaatgtaaacaggctaaatgccccaattaaaagacacagactggcaaattgaacagtcaagatccatcaaagtgctgtattcaggaaatccatctcacgtgcaaagacacatataggctcaaaataaagttatggaggaatatttaccaagcaaatggaaagcaaaagaaagcaggggttgcaattctagtctctgataaaacagactttaaaccaacaaagatcaaaagagacaaagatggtcattacataatggtaaagggatcaatgcaacaagatgagctaactatcctaaatatatatgcacccaatacaggagcaccgagaatcataaagcaagttcttacagacctacaaagagacttagatacccatactatagtagtgggagactttaatatcccagtgtcaatattagccagatcaatgacacaaaaaactaagaaggatattcaggacttgaactcagctctggaccaagcaaaccaaatagacatctacaggactctgccacaaatcaacagaatatacattcttctcggcaccacatcactcttaaattgacaacatacttggaagtaaaatactcctcagcaaattttaaaaaatggaaatcataacaaacagtctctcagagcacagtgcaatcaaatttgaactcaggattaagaaactcactcaaaactgtacaactacatggaaactgaacaacctgctcctgaatgattatagggtaaataataaaatgaaggcagaaataaaaaagttctttgaaaccaacaggaacaaagacacaacacaccagaatctccgggacacagacaaagcagtgtctagaaaatatatagcactaaatgcccacaaaagaaagcaagacagatctaaaattgacaccctaacatcacaatgaaaagaactagagaagcaagaataaacaaattcaaaccctagcagaagacaagaaataactaagaaaagagcagaactgaaggagatagacacaaaaaatccttcaaaaaaatcaatgaatccaggagctggttttttgaaaagattaacaaaatagactgctagccagtctaataaagaagaaaggagagaagaatcaaatagacacaatcaaaaataataaaggggacatcaccactgattccacagaaatacaaactaccatcagacaatactataaacatctctatacaaataaactagaaaatctaaaagaaatgaataaattcctggacacatacaccatcccaagtctaaatcaggaagaagtcaaatccctgaagagatcaataacgaattctgaaactgaggcagtaattatgagcctaacaaccaaaaatgtccaggacccgatggattcacaacctttgtaccagaggtacaaagaagagctgattctattatttctgaaactattcccaacaatggaaaaagagggactcctgtctaactcattttatgaggccagcatcatcctgataccaaaacctggcagagacacaacaaaaaaagaaaatttcaggccaatatccctgattaacatggatgcaaaaatcctcaataaaatactggcaaactgaatccagcagcacatcaaaaagcttatccaccaagatcaagtcaggttcatctgtgggatgcaaggctggttcaacatacacaaatcaataaacataatcgctcacataaacacaaccaatgacaaaaaccacatgattatctcaatagatgcataaaaggccttcaacaaaattgaacagccttcatgctaaaaacttgcaataaactaggtatagatggaacgtatctcaaaataataagagctatgtatgacaaactgacagacaatatcatactgaatggtcaaaaactggaagcattccctttgaaaactggcacaaaacagggatgctctctctcaccactcctattcaacatagtattggaagttctggtgagggcaatcaggcaagaaaaagaaataaaggatattcaaataggaaaagaggaaatcaaattgtctctatttgcagatgacatgattgtatatttagaaaaccccactgtctcagcccaagatctccctaaatggataagcaacttcagcaaagtctcagaatacaaaatcaatgagcaaaaatcacaagcattcctaaacaccaataatagccaaatcatgagtgaactcccattcacaattgctacaaagagaataaaatacctaggaatacaacttacaagggatgggaaggacctcttcaaggagaactacaaaccactgctcaagaaaataagagaggacacaaaaaatggaaaaactttccatggctgggcgcagtggctaacgtctgtaatcccaccattttgggaggccgagacgggtggatcatgaggtcaggagatcgagatcatcctggctaacactgtgaaaccccatctctactaaaaacacaaaaaaattagccgggcatggtggcaggcgcctgtagtcccagctactcgggaggctgaggcaggagaatggcgtgaacctgggaggtggagcttgcagtgagctgagatcgcaccactgcacttcagcctgggtgatagagcgagactccatctcaaaaaaaaaaaaaaaaaaggaagaacattccatgctcgtgcatagaaagaatcaatatcatgaaaatggccatactgcccaaggtaatttatagattcaatgctatccccatcaagctaccattgactttcttcacagaattagaaaaaaaaccgctttaaatttcatacagaaccaaaaaaaagctcatatagccaagacaatcctaagcaaaaagaacaaagctggaggcatcatgctacctgacttcaaattaccctatgaggctacagtaaacaaaacagtatggtactggtatcaaagcagatatatagaccaatggaacagaacaaaggcctcagaaataacaccacacatctacaaccatctgatctttgacaaacctgacaaaagcaagcaatgggaaaaggattccctatttaataaatggtgttgaaaaaactggctagccatatgcagaaaactgaaactggaccccttccttaaaccttatacaaaaattaactcaagatggattgaagatttaaatgtaacactgcaaaccataaaaaccgtagaagaaaacctagacaatactattcaggacataggcatgggcaaagacttcatgactaaaacaccaaaaacaatggcaacaaaagccaaaattgacaaatgaaacctaattaaactaagagcttctgcacagcaaaagaaactatcatcagagtgaacaggcaacctacagaatgggagaaaaattttgcaatctatccatctgacaaagggctaatatccaggatctacaaagaacttaaacaaatttacaagaaaaaaaaaccatcaaaaagtaggcaaaggatatgaacagacatttctcaaaaagacatttatgtggcaaacaaacatatgaaaaaaagcacatcatcactggtcattagagaaatgcaaatcaaaaccaaaatgagataccatctcatgccagttagaacggcgatcattgagaagtcaggaaacaacagatgctggagatgtggagaagtagaaaagcttttacactgctggttggagtgtaaattagttcagccattgtggaagacaatgtggcgattcctcaaggatctagaactagaaataccatttgacccagcaatcccattactgggtatatactcagaagattataaatcattctactataaaggcacatgaatacacatgttttttgcagcactattcacaatagcaaagacttggaaccaacccaaatgcccatcagtaatatacaggataaagaaaatgtggcacatatataccatggaatactaggcagccataaaaaaaaatgagttcatgtcctttccagggacatggatgaagctggaaatcatcattctcagcaaactaacacaagaacagaaaacgaaacacagcatgttctcactcataagtgggagttaacaatgagaacacagggacacaggaaggggaacatcacacaccagggcctgtcaaggggtgggggctaggggagggataacattaggagaaatacctaatgtagataacgagttgatgggtgcagcaaacccccatggcacgtgtatacctatgaaacaaacctgcacgttctgcacatgtaccccagaatttaaatcataatttaaaaaaacagaatattaataaggaaacaggctacataaagatggtataaaacaactatttctgacagaggtatagagagcactccttaacatcaggatacacacccttctgaatagctcatacaatatatttcttgatagaccacctcttaagccaaaaaagaagtcttaccaagttttttaaaactgaaattttatgaattattttctgtgactaaacttgaatgccagtatacaacaaaaatagaaaaaaactgaaaacaaaacaaatatgccaggtgcggtggctcatgcctgtaatcccagcaccttggaaggccaaggctggtgaatcacaaggtcaggagatcaagaccattctggccaacatggtgaaaccctgtctctactaaaatacaaaaaactagtgaggcttggtggcacgcacctgtagtcccagctactcaggaggctgaggcaggggaatcgcttgaacccaagaggtggaggttgcaatgagccgagataatgccattgcactccagcctggtgatagagtaagactctgtctcaaaaaaacaaaaacaaacaaacaaacaaaaaaaatatatatgaatttaacaaaacactcgagcatgctcttatgcaaaggttgtaatgttaatattgtaaagatgttcatcctattcaatgtaatctataaatttaatgaaatgtttttcaaatttctccttgcatttttgaaaaaatagaaactgcaaccctaaaagtatatagaatctcaaaagacaataaagtacccaacaatcttaaaataataataataaagcaatgttgcaggcattaaagttcctgatttcaaaagacattccaagccacagaattaaaacaatctggtataaggatgaaaaatcagactaaagaaatagaatgcgacacatatactttaacatgtatagtcatatgaggagtcatttacatagcaataattattactgtaagctagtaggtaaaggcaatgcaaatttctgtcaccaaatcattcagtaaatataatctgaaatataaatatactggaatatcactcagttttaaaaaagcagaaaatattctaccaattataacgataaatcttgataacattatgcaaaatgaaatgagtcagccacaaaaagacaaagattgtatgagatagagagatataaagcatttaaactcttagaaacagataaaaacaaaaaggtctcctatttgcttaacccccaacagcaagaaagtttgtcagtcatccgtgacaaaaatatcttaatgagggaaccaggcatcatggttaacatctgtaatgacagcaacatggtacagtaaggttggagaattgcttcaggacaaaattttaagaccaacctgggttatgtagtgaaaccccatctcaaaaataagtgcctttaagagagctttgagatccagggaggcaattgtgaaactttgctaaagcccaagattgaggagcacccttttcagcaggcaagctttcattcaagtggcaaactacaggacccctgctcttgactacagaccagaaaatgtcccacccaacttggtcccacggagaattttgaacttactctgtaaccatcccaaactcctcccagccacagtctgtgagaggtctttgtcttccagaagcctggagagagatacccatttagagccatgacggcaggccggcagaccttggtccttactgtggttccaataccagtttcatgactcagttccagtttcctaagccacggttcatggccacttctgcccatgtagaaacctacagtgacctcagaaatgctctctggtactcagtgaaaccatactaatccacatcctattataaagcccaccatacgcagacctgactgcagaaacctgccctagcatctgataccctactgagcaaagtcctgagggatatttactctgtccaaaaataaaatgggaattacaactaccaaagccccttatagtaagccaactctattgcagagccagcagccctgtgaccgagctacaaccctctgaaaccagtttataaaaactttaagaggtgtttactccttcaaattcatacaccaatgcaaaagtatattgtgttcattgtcaatgcttctattttaacacagcacttgaagtatgtggaagaaaaattagtcaaaaaaattttaatgtcattgaaattgaagacaaataagtaaaacattgctgtttgtaaatcatgcaatgttctctataaaaaaccataaacagtacattaaaaccttttcaaaccaataaatacactcagtaaattagcaaaatataaaattaacatacaagttatgtttccatacacttaaactatctgataaaatagagtaataaaacaatcttatttacaatagcactaaaataataaatatctgagaacaaatttaactgaggagttgaaaaagttttcaagtgcaagatttatcaatgaaaaataatgagaacacaaataaattcaaatacattttatgcctatcaattcaaagaataaatggtaaaatgccatattatccaaagtgatctctagattcaataaactctctatcaatattccagtgtttttttcacagtaatgaaaaatacaatcataaaatttacatgaaactacaagaaactgtgaatagccaaagcaatcttgaagaaaaagaaaaaagcagaaggacatcatactttataatttcaaactatatttcaagactacagtaataaaaacaggatgaaatgtacagaaaaatgaacaaaaaaaccccaaagatacagaaactactactctcacacatttcagagatgatggaaagagagaacttataagatagtttaacatggagtatcttaaaatcatgcagatatctgtgtgtccacaaaaacaaacaaacaaaaagattgtgcactctcttgtatgccatgaacagtactttggctgtcactgtaaacttgaaggaagattactgaagggaaagaagaattcttagaaattttaaaagtgtaagaccgaagatgcccctgtgtgagagaaaattaaagaataaaaataaaaattagtctctccagaaactacttcttttggaacacagcttccagaatcactttaaggactggcttcctccttgactttcgacctctcatccatgttgtctgtattcactctcacctacctggggattcttccaccatctcatgtctcttcatattccaggactcttttccttcctccagaaaaatgatcaggtctggcttaaaggcagcaatacctgttttattaaaaatgaacaacatgcttcttgctcatattctccaattaccaactcagtaatgtgctcagtaaagaggatgtaatagaatattctaatagatttatcccaaaatactaaattataataagttgggaaaaaggcttatggggtgcctgtataagctggccataaaaatatgggacaatatgttgtggaaagccacaggaggcctccgaggaggaaagcctccttactgccatcacgttcccatgaccagagcgtgacctgctctcttacttataaacactgtgctcaaggagaaagatactcctttgaagcactggaatgtggccagatatgcaggctcctagttaggcccaccccccaacagctgctctccggtaagttaaagaatgaatcagtagttaagtttattctgcttcagcacaaagaaactttgcctaaaccaccactgctatagattaggtgtatgacacactacctccctttcaccatttcacccctgaacatctgcttcttagatctaagtgattatactcaataaatactgtggagaccagaacttgatgccttttgcagcctccaaaagtgcaactggtcccctggcaccccaccctttgtgcactcttaacctgtctcttctcattccttcgtcgccaccggactttctgtaccctacaggtggtattgaagctggtccccaacaataacagaaatttctaaatatttagaaaattctctaattttgtaggttcttaattttatcacctagtaatactgaattaaaaattggtggttgccagtaaacttttgaaattaccattaatctaaagtgaaggacacagatcagctcaagaatgtggtaagttcaggtcaagatgaaacatcttgaattttttttctatatggaaaaactcctatgattttcttgaaaatagaaatctgaaagcataaattaccaaaaagaaattatacaaaaaagaaatggtgttgggagctgaaagcctgagggtcatgaccaactcagcattccactggaggctatatgataaacagcaaacagtttatcatgaatgcagaatgtgggcaaacttgcttctgctcctgccaccagaaggtacactgaggacagtcactccctggtgccatgctccttgaagttatctactggaacatctggagagtgctgttgaaagaatacagtcatgcaggccttcattaagtcaagcagctgaccacaacctcccccttctccctatctcctttactcaataaatacaaagggctatagaagctcaggacccttgttgactagaagcaaggaggcccctgaccccttcttccaaatatactcttttgtctttgtctttattctcacattcatcctccgttgttcagtccaataaggtctgcagcaaaatgaaacctgtagtgtatactaggaattgcgtattaaagttattctcacccaggaagaccaggtttctgtagttctctaacatcacatttctatataaattctgctgtgcagtgtccaggcattgccactcctccagagagaattctatggccacatccctaaatgtcaatgatccctggaaaacacaaacacacatatttatcaactggacatgggcagaatttttaatttgactcaaggtaaaatgcagagagtaaagagagctggttctgacttataagcatgactgaaattattcaataaaataatttttaacacaaatattctctaacatattctctctcttttttctttttttaattattattatacttcaagttttatggtacatgtgcagaatgcgcaggttaattacatatgtatacatgtgccatcctggtgtactgcacccattaactcgtcatttagcattaggtatatctcctaatgctatccctccccccaccccccaccccacaacagtccccagactgtgatgttccccttccggtgtccatgtgttctcattgttcaattcccatctatgagcaagaacatgcggtgtttggttttttgtccttgtgatagtttactgagaatgttccaatttcatccatgtcccaacaaaggacatgaactcatcattttttatggctgcatagtattccatggtatatatgtgccacattttcttaatccagtctgtcattgttggtcatttgggttggttccaagtctttgctattgtgaatagtgccgcaataaacatacgtgtgcatgtgtctttatagcagcatgatttatagtcctttggatatatacccagtaatgagatggctgggtcaaatgttatttctagttctagatccctgaggaattgccacatggacttccacaatggctgaactagtttacagtcccaccaacagtgtaaaagtgttcctatttctccacatcctctccagcacctgttgtttcctgcctttttaatgattgtcattctaactggtgtgagatggtatctcattgtggttttgatttgcattactctgatggccagtgatgatgagcattttttcatgtgttttttggctgcataaatatcttctttggagaagtgtctgttcatatcctttgcccactttttgatggggttgtttgtttttttcttgtaaattagtttgagttcactgtagattctggatattagccctttgtcagatgagtagtttgcgaaaattttctcctgttttgtaggttgcctgttcactctgatggtagtttcttttgctgtgcagaagctctttagttcaattagatcccatttgtcaattttggcttttgttgccattgctattggtgttttagacatgaagtccttgcccatgcctatgtcctgaatggtaatgcccaggttttcttctagggtttttatggttttaggtctaaagtttaagtctttaatccatcttgaattaatttttgtataagatgtgaggaagggatccagtttcagctttctacatatggctagccagttttcccagcaccatttattaaataaggaatcctttccccattacttctttttctcaggtttgtcaaagatcagatagttgtagatatccagcattatttctgagggctctgttctattccattgatctatatctctgatatctctgttttggtaccagtaccatgatgttttggttactgtagccttgtagtatagtttgaagtcaggtagcgtgatgcctccagctttgttcttttggcttaggattgacttggtgatgcaggctcttttttggttccatatgaattttaaagtagttttttccaattctgtgaagaaagtcattggtagcttgatggagatggcattgaatctataaattaccttgaatctataaaatacctagtatggccattttcacgatattgattcttcctacccatgagcatggaatgttcttccatttgtttgtatcctcttttatttcattgagcagtggtttgtagttctccttgaagaggtccttcacgtcccttctaagttggattcctaagtattttattctctttgaagcaattgtgaatgggagttcactatgatttggctctctgtttgtctgttattggtgtataagaatgcttgtgatttttgtacattgattttgtatcctgagactttgtcgaagttgcttatcagcttaaggagattttgggctgagacaatggagttttctagatatacaatcatgtcatctgcaaacagggacaatttgacttcctcttttcctaattgaataccctttatttccttctcctgcctaattgccctggtcagaacttccaacactatgttgaataggagtggtgagagagggcatccctgtcttgtgccagttttcaaagggaatgcttccagtttttgccgattcagtatgatattggctgtgagtttgtcatagatagctcttattattttgagatgcatcccatcaatacctaatttattgagagttttattctctaactctgataaaagaaagtggtataagatccataacatcagtttatatgtaatatttttctagataataaagtataaactgagggcataaacactaacatgtacaattttgagtgctatatttacatcatacagaattaattgtgtgccaggcatggtggcttatgcctgtaatcctagcactttgggaggctgaggcaggcagatcacctgaggtcgggagttcgagaccagcctgacaaacatggagaaaccctgtctccactaaaaacacaaaattagccaggcatggtggcgcatgcctgtaatcctagctactcaggaggctgaggcaggagaatcgcttgaacccgcgaggcagaggttgcggttagccgagatcatgccattgcactccagcttgggcaacaagagtgaaactccatctcaaaaaaaaaaaaaaaaaaagaatcaattgcatttttcaaatggaaagacatagttttgtgtattattcagatggaatagatgtgttgagttagaaggtatcactcaaattttaatgtgtacaacaagctagagatcctgttaatgcagattttttttttccagaagatctgagataaagtctgagttactgaatttctaataagctcataagtatgccaaagtttttggcccaaaaagactattttgtcaaatatccagtaattgaatgagcctgtgtttttctcagtttttctggtttgtaaacaaagatgagaggtttcattttccaaaaacagacaaatggaaaggaaacctaagaaagaagggcagcagccagattaaatgtgttggtttattcacatcagctgcataaagatacttgatgatgaagagaaaaataattaattctatagtgaaaaaatgtgtcagaaagcttatcaaccaagtgatttattaacatcaactacactagaacacatttttataatgtcctgatgcacccagaaggacgcagcattactgctgagatattgccccctgaaaggtaaattatagtctgagtttaaccataaggaaacattagttttatggaaagttcaagatacagatatctcccatgttctgtaatttttagtagtgattttaaatagtctttctttagcactgtagaaagcgggtatctcctaacaatttttaaagaattttctgggtaataaataccatactgcttcaatgagtgttttcttatcctgtactgcagagacataataaagaacacagatgaaaccacaacattatatgttctgtcttcactaaaaaccccaggttttccccaataggaattttgagtgtctacatcttcccatgttccacagccacaaagggacatttttaatattgcagattataaattcatagtgagatttctgcatggcatagaagaagccgtaatatagagaaggctctggtatacagaaaaaatatatatttttcagagactttgattattgtcagaattttttcaaatagttaagacaaactcattagggaggaaaaacacaaatacagaagtacaggtttgcaagtactaaacacatgttttctggaggaagcagactggacacagatcttgatctgagacatgtttagctgaaaaagaaaaggccatttttttctccttctcctccttctctaggattctttctcaaataaaattttctagacaaattacacctgcatcttgagaatatgcctttaaaagtgtcagcaccacaggtctacctgctgtcaccacatccacaggcagaaggaccaagacagaaaaactccatccatttctgtcctttatagccgaagagattaacaaagagtagctccacagagataaaaatatgcttttctttattttgtcctcaggagccatcccctgacacaggcaccagcaatttctgccacagtaatggaaatatgggccacgctgtactgtccctaccaaatccaaacagaattaggttcttggaccaccctttaatgcaaagatggaacttaactctcatgaatgtattttgaattcctcatacttgattctggcctcaccttagagtcacatgagccacttaattaaaacaacatggatgcttccaccaagaacaataaacagaatccatggacagggcacaagtaaaaagagttctgcaaaatggccaagtgatactaattagaagcctgggctgataactccttaagtaagcatttcctctcaagctctaatgagcttataaaatcacttggtaattttggccccactctatgaaatgtaattctgcaggtatggaaagggtccataaatgggtcttttaaacaaatgccctgtcaataatgatgttgctcccactgggcttattattagcattagtcagagaaatgaggcacaatgcagagtcccttacacgcagcactcttgtcaaaacacaaatacttctggtacaaatgaagacaatcattcttcatcctaaagtattatattctttgctgactctttaaagtttgcagaggaaaaaaaaaagcagcaatttctgagtaagtctgcatttggaaaacaacatgtgcacatgtactactacaatgtttattaagcaggtactatgtgctcaataggaagttacagagcactgtgatagcacattatgtgatttaatcctaataacaccctttcagttgatactaagtgttcaataattccaaggctttaaaggacccagcatttttatttctatttctgtttaactgtcattgattttttcaaaaaatgtatagaacaaaagctaaatatagacagatgaaagggatacagatggaaagagtttaatgcaatttagatacatttttattgtgtttatatttactttcttgtgacttgtgaatcaactactagatctggaggaacagaaaacaagctgctaaataaagtctcttcaagcactggttttaataaaaaatttgaaaagtaagatcctataatacatactttatatttcccatttatctgcttttaagtttcagaaaatgttgaacaccagctctaaaaaggcaacaggattcatgacccaaaactctgatctcttctaatcggttctttcaggcaagactccagggtagggccagacataaataaggcctccaaaaaagggtgaatatgaacagggctggggcagagtgtagagccgatgtacaattctgttctctatgccactggggggtactgtcagttcttttttttaagcttacttaagtaaacttaaatccgagtttgtataattttaatcttttttagccactgccctgtaaattttatattacatactaataagcaattcaaaaaaaaatcccttaaggttttctagaataatttttttagaagaaaaataagtattcttagcagggtaaaagaaatacaaataataataatgactcttccgtttataagttcaggtgtagacatcagaaaccacaatataaagaaagtggctcaaataaagcccaagttgttttttgtacatatctatttattgtacccaccatatgatccataattcaaccatttttccagttgctagtctagactacaacttccaggatggtagcaatcatgactgcttatctgtttttcttttctttttttttttttttgagactgagtctcactttgttgcccgggctgtggtgcgatggtgtgatctcagctcactgcagcctcctcctcccaggttcaagagattctcctgcctcagcctcccaagtagccaggactacaggcatgagccaccacacccagctaatttgggtatttttagtagagatgggatttcaccatgttggccaggctggtctcgaactcctgacctcaggtgatccacccatcttggcttcccaaagtgctgggattacaggtatgagacattgcacccagcctgtttcttctatttttttatgactatatgaaatggaagcaattagtttatctgtttgagcctccagacctcctgattttttacccaagtaccagggaactggaaaaactctcatctggctaccaaccagagatacttcttgtataacgggtgaaacaaacacgagatgactcatttctctcacactgggacagaagcagaattaatcactcttgtcagcctgacacaattctgttctggacattctccaatgtctcagagattcataggtaattgttagacggttccctgtgaacctgggctgatggtccaatgataagacaggcagagaagactcaggatgattctaaataaaaaaatggaactactttggctcaactccagaatccgggttgtccgtcctgatttgctagctgttgggtaagtagaaggacaagaagactctactccagtatcacattttacaggtaggtatagttgtggtcatggctctggatactttgtggtcttaagatgcttgtttacacttacagattctgccatcagattctatttactcctggagcctctcatataactgtggcaggttaatgaagaagatgtgaaaaggtcaaaaagccacactcccaaaaaaggaatttaaaatgtctatgttgatatctcacaatgcagaaaatgcctcctgttggttttctgtaaattctcaatccaaagtctggccctgccttgtaaatcccagcagaggccaggtcttatttgcaaattctaggtgaaatcaacctcactctgcatttttgggtgttacagcaagtagagtgaaatcaaaggagagattccctcctagaggctgctctaggatattctaaataatattttaccttaaaaaagctgacacaacatgaacataagcagacagtttatttgggtcaagcttaagtattttaacttgagacaaaatattcaagttgcctggaatctacactttcattagcagcacttacaagtggatttgtgaaggcaaaaaagaggaacagtgagtgagctgatacaaaattggttgtgagaaattcttatttatgtaaagaaataactttaataattgattggatatacatcattaaggttaaggatatggaatatagtgtccagtgtagaattattagtttaatttatagctacttgtggcaatagtgaacagtttcaatagataaatatatagctgaaaaaaaggagaaaaacgtaattgtgctctcattttaatgtttctctgactttagtaactaaaaggacttgcattcctcagataaaaacttatttttttcttttcaattctcaagacttagatttagaatacggagctgcaaattcaggtcctgcatgggtaaagtagcaataggtgttacctgaacatttgtgggcattttagcatgaggagggagggagaagtggattctcacgtctacaggtctactcagtgcacatattttactctgattgggtttctgtgccccatggtcactgaatcagtttcaggtctgaagacacaagtcattgaaagaggtaaaatggttaatatctgacctatgaagtttgtagaaatctgttctagcctctctaaaagtgactgcagaggatgatagataccaagtacgtagagacacaattccacctgcatatttagggtacagcatgcacttcacagcacaactgtgaattgactggaagcctgagtggaaaaggcccatctagagtaaagcttagttggcaccttatgtgtttgtattatgtctggtaattctagacaaggtttgggaaatataattagaagcacaattttcttcagccccagaggaactccacataacagaacagaaagaaaattgttttattacacaattacatgtgaatatgacatgcattatagtcaatttgctcaagagattgcaaagacagaaagacagtgaccataatttgtctacaagtagaatttacagcaccatgtcatacatagttcatcctaaattcacatggtagttgggaaggccatccatgtatgctaattggttataatcaatgacaaaataaacttttcacatcttcatgactggaggtagttttgcaacttgaaccccggtgcctactgaaggtaggctttgactcttctacaaaaagtgttgattcgggtgctatctttttggctatttacattttaaagcaatagctctctactccctgagcactgggctagagcactcctgctttccctctcttggtggctagtgtactctcttgaccccaccatctgccactgaggcacagcccacagcacagggctcacagctggaaactcacatcttaggtgaaccccatttgccacagcagcactccagtggcacatcagacagtgaagcctgagcagcaggaggagagcctgcaggcctcctgggtagaattgcaccttcacaataatagaaaagggagcactgtttcagcctcagtttttatttataatggtgacatgaaaaaaatactgctgggttttagcatgagtccagatagagacagctctgagagttctcactgtgacagctcacgtctttcacagacaccacgggatactaatagggcttctcaaacagacacacaatgcattagagagaaaaaactgctctcattctgagaaagattatgttgagagaaaaaagttaaaagtgtcttaagaaaaaactgagattagatataagattgatcaagtcagccagaaaatatttccctaagaagaatttctctccaaacacccaaagtgcatagctactctcagcaagggaaacatgagcattattgaataaagggggcacattctcagcaaaaaaaaaaattttttttttttgagatagagttccattcttttttttttttttttggacagagtctcactctgtcgcccaggctggagtgcagtggcgcgatctcggctcactgtaagctctgccttctgggttcacgccattctcctgcctcagcctcctgagtagctgggactatcggcgtgtgccaccacacccggctaatttttttttgtatttttagtagagatggagtttcaccatgttagccaagatggtctcgatctcctgacctcgtgatccacctgcctcggcctcccaagtgctgggattacaggcgtgagctgccacgcccggccaaggagtttcattcttgttgccctggctggagtgcaatggtgtgatctaggctcactacaacctctgcctcccgggttcaagcaattctcctgtctcagcctcccaaatgactgggactgtagacacacaccaccacacctggctaattctgttatttttggtagagacgaggtttcaccacattgtccaggctggtctcaaactcctgacctcaggtgatccaccccccttggcctcccaaaatgctgggattacaggcatgagccacagcgcccagctctcagcagaattttaaaagatttatcttccatctctgctgttctcttatttcctaaccattgaatgtgagatatattggaatatatctgacaacttccaccagcacttttttataaaaattgaaatctgactgtgttaatatagtagaatatattagagcttgcaacatagctaactggagagcaattacggtttttgggtagccatatcacttgtctttgtcctgtaatagtagcaagctaatttggtaaaatatatgacactaaaattatgctataattttatagcataattttatgctataattttatagcataattttatgctataatttataaattatatacctataatttattcccattggataaattaatatgcatgtcagactaatatctactataatgatttaatggtaaatttttttggatatcagatacaaatatgtaagtatgaataattttatgtactactcataatgtatgtaagattttaaaaaattatctgaactatacttcagttgaaacactatatttcaaaaatatgaataatattaaaataactaaggaattcaatctaagtaaatacgtggccttaaattcatactattgtagaaaatactgtttatatgaatgcaggttgtctacaaacactacacataactatactaactgtactgaagtaacccaagtacaacagactccactgttcagtctatacactgaactcttctggcttttgcagtgtaagtatgtcagccagcaaataatcaccctggataatcaggtttctgccaaagaacttactcaggatcttttagtctttattattctgtattgctaaatttaatccaatctttgtgctcaacttctttatgctcttgaaatgaactttactctgaacaaatttgtgtctactttaaagactaaagacaaaaaaaaaaccaatattttgccaagacaaaaagaaagcaatgaatctcaggtcccagataaagacaattctgagtcaaaaagaatgacaaatggtttgtgttattgctaatatgatttacatatatttcaaaaagcagaaaaaatatatacatataatctaaaccttttataaaaatcagcaagttatcctcccttattttcacatatgagaataaagcttcttatttctaatttatattttgtcttacaacagccaggtctctggacaagttcttgaactcttggacatctgaattttgcacactgtgtgcacttgaaagaatgtttatggggggaaaagcagaagagaggaaggtgttataaaaaaactccatgggttcacatgaataaagcaagttcttagagacctatgaagagactcagaatctgacacagtaataatcggagactacatctgacaagcactaatggacagatcattgaagaagaaaattaacaacaatattacgacttgaactcaacacttgaccaaacagtcctaatagacatctacagaactcttcatcgaaaaataccgtaatatatgttcttctcatcaccatgtggcacatactctaaaattgaccacacaatcagaaacaaaacaattctcagcaaattcaaaaatccgaaaattatacaaaccacacacacagattacagcttaagaaaaaaatgattcaataccaataaaacaactggaaactatacaattaaataaaaattaaatggcctacacttgaataactttttggtaaataatgaaattaaggcagaaaccaagaagtgttttgaaacaaataagaacaaaaatacaacacaccagaatccctgcaatacatctaaagcaatgttaaaagaaaaatttatagcattaaatccccagatcaaaaagttaaaaagatctcagtttaacaacctgacatcataaataaaagactgagagcaacaaaagcaaatcagcccctaagctagcaaaagacaagaaataaccaaaatcagatctgaactgaaggagatttagacatgaaaaattacaaaatatcaagagatccaggtataaaatctatttttttaaaaaaggtaaataaactactagctagattaatgaagaagatacaaataaacacaattagaaataaaaaaaagagacattagcactgaccccacaaaaatatactgaagtctgctatgcatataaacaaacaaacaaacgaaatctagaagaaatgaaaaaattcttgaacaaacacatcctcccaagactgaacacacacacacaaaaatcaaagccctgggctgagtgcggtggctcacacctgtaatcccagcactttgggaggctgaggtgggtggatcacctgaggtcaggagttcgagaccagcctcaacctggggaaaccccgtcactactaaaaatacaaaattacccaggcatagtggtgcatgcctgtaatctcagctactcgggaggctgaggcaggagaattgcttgaacctgggaggcggaggttgcggtgagccgagatcgagccattgcactccagcctaggcaacaagagcgaaactccatctcaaaacaaacaaacaaacaaacaaaaaatcaaagccctaaatacatagataagctcaaaatattgaattagtaataaatagcctaccaactaaatgaagctcaggaccagacatactcacagctgaattctaccagatgtacaaatagaagctgatattatttttactagaacaatttcaaaagattaaaaagaagaaactcctctccaactcattatgtaagaacagcatcattctgataccaaaacctaacagagataaaacaaaaaaaggcaacttcaggccaatatccttgaaaattgatgcaaaaatcttcaacaaaaggctgggcctggtggctcatgcctgtaatcccagaactttgggaggccaaggtgggccaatttcctgaggtcaggagttcaagaccagcctagccaacatgatgaaaccctgtctcttctaaaaacacacaaaaaattagctgggcatggtagcacacacctgtaatcccagctactcaagaggctgaggcaggagaatcacttgaacctgggaggcagaggttgcagtgagccaagattgcaccactacactccagcctggatgacacagtgagactccatcccaaaaaaaaaaaaaaaaaaaaaaaaaaaaagaaaaaagaaaagaaaagaaatcttcaacaaactactggcaaaccaaatccagcagcatatcaaaaagctaacccactatgatcaactatggtttattttggggatttaaggtttgctcaacatacagaaatcaataaatgtgattcatcacataaacagaattaaagacagaaagcacaagattatctcaatagatgcacaaaaagctttcaataaaatttaacatttttcatgttaaaaaccctcaacaaactaggcattgaagatgcatacgtcaaaatagtaagttatctatgacaaacccacagccaatatactgaatggacaaaacctggaagcattccttcttgaaaactggcacaagacaaggatgccttctctcaacactcctatattcaatataaaattggtagtcttagccagagcaatcaggcaaaagataaaaataaaaggcatccaaacataaagagaggaagtcaaactatccttatttgcaaacaacatgattctacatctggaaacccatatactctcagcagaaaagctctttaaactgacaaacaacttcagtaaagtctcaggatacaaaagaaatgtacaaaaattagtagcaaccctatatatcaagaacacctaggccaaatccgaatcgaaaacacaatcccattcacaactgccacagaaaagaataatatatctagaaatacagataaccagaaaggtaaaagatctctatgacaagaattacaaaacaatgcttaaagaagccagagatgacacaaacaaatggaaagcaactttatgctcatgaataaaaaagatcactatcataaaaatggtcatactgcttaaataaatttacagatgtaatgctaatttaatcaaaccaccaaaatatttttaacagaactaaaagaacaaactattttaaaattcacatggaaccaaaaaagagcctgaatagccaaggcaatcataagcaaaaacaacaaagctgaaggcattacattacctgacttcaaactacacaacagtgctacagtaaacaaagcaacatggtactggtacaaaaacaaactcataggtcaatgcaacagaatagggagcccagaaataatgccacacacctaaaaccatctgatcttcaacaaaggtgacaataggaatgtgggaagaatttcctatttaataaatggtgctagaataactagctagcactatgtagtagattttttataacaccatataaaaaaatcaactcaaggtaaataaaagacttaaatgttaatcttaaaaaggatatattttaaaaaaccctggaaggtaagaagtgccattctagacatagaaactggcaaagatttcatgatgaagatatgaaaagcaattgcaacaaaagcaaaaactgacaaatgggacctaattaaactttttcacagcaaaggaaactatcaacagagtaaacagacatcctacaaaataatagaaaatatttgcaaactatgcttctgacaaaggtctactatctagaatccataaggaactaaaacaagtttacaagaaaaaaaaactaaaaagaagaccaaaaaaaaacatgaaaaagacgtttgtcttcaaaaggagacaaacatgtggctaacaagcatgtaaaaaaatgctcatcactaatcattagagaaatgcaaaagaaaaccacaacaagaaatcatctcaaaccagtgagaatggccattattataattcaaccattgtgaaaagcagtgtggtgattcctcactaaactaaaaacaaattaccatttgacccagtaacctcacaattgggtatatacctaaaaatatataaattattctatcctaaagacacatgcacaatcacgttcattgcagcactattcacaacagcaaagacatggaatcaacctaaatgcctatcactggtagactagataaagaaaatatagtatggttgggcatgttggcacacgtctgtaatccagcacttcgggggatgagctaggtggattgcctgagctcaggggtttgagacaggcatggacaacatggcaaaatcccatctataaaaaaaaaagtacaaaaataaaaattagctaagcatggtggcacagactttagtcttagctacttgggaagcttaggtagaagaggattgcttgagcctgagaggttgaggtttcagtgagccaagatcacaccactgcactccagcctgggaaaaaggtgagaccctgtctccaaaaataacaaaaaaattaaaaactttattaataaacttaataaaaacaaaatatgggctgggtatggtggctcacacttgtaatcccagcactttgggaggccaaggcggcagatcacctgaagtaaggagttcgagactagcctggccaacgtggcaaaaccccatctatactaaaaatacaaaaattagctgagtatggtggcacacgcctgtaatcccagctactccagaggctgtggcagaattgcttgaacctgggaggtagaggttgcaatgcgccgagatcaagccactgcactccagcctgagtgacacagcaagattccatctcaaaccaaacaaacaaacaaatatggtacataaacaccatgaattcatgaaatactgagtggccataaacaacaacaacaaaaaaaacaagattatgtcctttgcagcaacatggatgaagctggagatcattattcttagaaaactgatgcggaaacagaaaaccaaatgcatgttattatttataagtaagagctaaataagaacacatgaacacagaggggaaaaaagacactgaggcctagtagagggtggagggtgggaggactaaaagggtcagaaaaagtacctttttggtgctatgattagtactgcagtgacaaaataatctgcacaccaaactcccatgacataattttagctgtataacaaagctgcatgtgtacccctgaaccaaccaaaaataaaagttaaaagaaaacaaagtccctgggttggagagagtgcaatgcaggtggaaggactggtttgtcctatagatagtggcccaggtggggctgtactctgatttatttctgggtccatgcaggcagataagattatgaaccctaggctggtggagaaaacaggttgctactgcagattcagtgtctgaaaatagagatatgccaggagacttgtagacacttttgtggtttttggccaaaaaaaccactaggatcaaaaatgctgtggtaaaattcctgagggtggtgccttgtccagagaggagtgtggacacatcaatgtcaagtgggtgtttgtgagtgggtagaaatcctctgctggcagctgtggcaaaagggggtttgtcatcagatctcttttaagttttcagtcctctgtcaccctgggaggagatctgaaatcaaagaacaaggggcagtgtgacagcctgtgtagaggagatcagagcttcccattcccagacacccagagtttcattccaggccaggagtctgtgatatctttcttctggcaccaaatctgcagagtttgatgaacaccaacaattctccaacagcaactcattgtctaacacttgaattctgacaccacccagagtcagcacagaccctgattcagggctcagtcccacaacattgtcctcactgcagatgccagtcacaaaccccatgggctcatctatgcttctgacctactgtttaaaaattggggactcccataacctttttgaaattcaataacctgatacagctactcacagaactcagcagaacactagttatacttactggcttcaaataaaatatacaacccccaaaaagtcaaatggaagaaaagtatagaaccaagaaaagaggtgggaaaagatgaagcatatagataataaatagccgggattagtaaaattctctatcctctgtgttctccaggaacacttatgaaaagaaaaacccttctcatcatgacttagatggtgctcttttcttacctactacacaaccaggaaaacactctgcatattttcttcttcttctcattaaaaaaatcagctgaatttgccttcagtggtcaacataaaataccttttaatcaaacttaagtttattttcttcccacaggctcctgaactctgagctactctcagtccgagccaccatacaacctcattttatgctactgcagattcagtgtctgaagaacactcctaagaacacactgacttcagggtaaaacattctctgatctaaaatctgattatttcacccttcatttaaacattcccctcaccttctttctaatcttatttgcttttccctaggaaaaaaagcccttttctacctaatctttgcaatccttaaagatcttatagttggtacttcctcctgttgtaatactcctttggaattcaattttttttttaatgtacgtctaactggtttattttaaaacctctcgaatctgcctcaaaacagtaacaatttactgtttaacaatttagggctagggttcagtttagggttaggtttagggttccgtaagacacccccaaacctcttctatcttaaccttaactgcatctgcctgtggggccccagctttccagggctctgtagcttctctcactatagaggcttcttccatggctgcggtaagcaggctgggacatctgcaggaaaggctttccagaaggaactaactgggcctttaataacctccgtctgctggctcaaaattaaccttagcttgcagtcattaggctcaagctttaatttaccatgtcagagtcattcacttagtttttgaaattgtgtttgaaaaatccagcaaaatgattcaaaaacagtgttcatataagaaaattttaaggtgcttaccttttgtacctcagtaagagaagcaaatgtatttatttcttttggacaataaagcattattttattttttgtattaaaaatcatgtggtaaacagttatatgggaacacttctaggaggtaccaagtttcatgacataaaatttaccattaaactcagaaatcgaaaaacaggatatagaacaaagatatttatttttgcaaattcaccctgcaagaaaagaaactgatgttttcacgaatctgtgtaactcaccaattacctaccgcattttcttgtggaaatatattaattctctatagccaaaatggaagaaaaatttttatttttttcctcagtagctaacattctaaaagctagatggaattctatttgaaatcactcagccataaaaaacacacctgagggccgggcacggtggctcatgcctgtaatcccagcactttaggaggccgaggcaggtggatcatgaggtcaggagattgagaccatcctggctaacacggtgaaaccccgtctctactaaaaatacaaaaaaatttgctgggcgtggtggcgggctcccactatttgggaggctaaggcaggagaagggcgtaaacctgggaggaggagcttgcagtgagatcccgccactgcactccaacctggggacagagcaagactctgtctccaaaaaaaaaaaaaaaaaaaaaaaaagtaacacctgaaaaaactcctaaattcactctgagaaaataaaagatgaatgagaattttcaacaaataaaatatataattagatattgttttttgaaattcacctttttttatgccctttgtaaatattttcttacctttcaagccctactaataaaatgcaatttacagttaaaaaactgaggtcagccgggcacaggggctcacacctgcaatcccagcactttgggaggccaaggcaggcagattacttgaggtcagaattttgagctcaaacagcacggtaaacatggcaaacccccatctctattaaaaatacaaaaagtagccaggtgtggtggcaggcacctgtagtcccagctacttgggaggctgaggcataagaatcacttgaactcgtgatgcagaggtttcagtgagccgagattgcaccactgcagtccagcctgggtgacagaggaaagcactgtcttaaaaaaaaaaaaaaaaaagggccgggcgcggtggctcacacctgtaatcccaccactttgggaggctgaggcagccagatcacaaggtcaggagttcgagaacagcctggtcaatatggtgaaattccgtctctaccacaaatacaaaaattagccgggtgtggtggtgcacacctgtagtcccagctactcaggaggctgaggcagaagaattgcttgaacccgggaggcagaggttgcagtgagcagagatcataccactgcactccagcctgggtgacagaatgagactctatctcaaaaaaaaaaaaaagaaaaaaaaaactgaggtcaaaataagtgaacaatgcatttaatcatttcaaggtacagatatgtctgactcatgtgtcaagtcaggccatccaattacttgagagattctcccaccccatcctgttcacttaagtgctcagtaaccattctctcaggagactctgaactatgccccagtgagtgccccaggtacattttactttgcaagttcttgcaccatctcactggggtcagtttttttttttgtctttggagtgctattttttttcacaaactttttaccatttttatttcactatttttctgtcccctaagagaatccaggggcaaaaattattttggtttccccttcaataccagcatctgattgtctgaacagcaatatgtctccaagaaatggaagctgcgttgggtaaagacaacactaatatctcaaggggttagctttccaaaaaaacagcacaccagaagatgcctctcagccccagggtattcacctgctctcttgagaggctacactccatatctcatgttgtgttatgggagaagagaggctacactgtgtacctcaggttgtcttatgggagaaaatgacccaggagctgatattcactagacgctctcgcagacatagccatggcgggtatcttagtttttccccagatagtactgaatctcaggtccaagaaaaaactgaagggtgtctgaggacacatctccctataaagtttccaaagggaaaccttgacccaaaacattctgatatctatgtctacggaaaacagaagaaaaaatatttacaaacagaaaacaaatctttttaaatgtgccatcaaatgctttgtcaaaaaatgattacaataggtatcaaaatgtaaactaaaggacaaatagttgatcatgtgaataagggaggggaaattggcgtttgggaatgtcagaaggaactggaaattaagtattttactgcaagccagagtcaggctggagaaatagggggtggcagatagacttgaggtcctgcttgggacacatgtgaaaaatgcaaggaaacagcaattccttgtggggtgtgaaaataattaagtggctggcagttagactgaggaggctctagtttctaatttctacttttaaaaaatctaattcggccaggcacggtggcttaccctgtaatcccagcactttgggaggccgaagcaggtgaatcacttgaaatcaggagttcgagaccagcctgaccaacatggtgaaaccccgtccctgttaaaaatgcaaagttagagggcatggtggtgcatgcctggaatcccagctacttggaagtctgaggcaggagaatcatttgaacctgggaggcggagattgcagtgagcccagatggcgccactgcactccagcctgggcgacagagtgagacttggtctcaaaaaaaaaaaaaaaaaatctaattcaaatgcattttttgtaaattactacattgggggaaaaaatttcaggcttaacacactataaactgccaattaacctctgattacataaccaagaaacttccatcttgatgttacaaattaagaaaccacaaggccgggcgcggtggcttacgcctataatcccagcattttgggatgccgaggcgggcggatcacgaggtcaggagatcgagaacatcctggctaacatggtgaaaccctttctcaactaaaaatacaaaaaagtaaccgagcgtggtggcgggcggctgtagtcccagctactcggaaggctgaggcagtggaatggcgtcaacccgggaggcggagcttgcagtgagacaagatcgtgccacagcactccagcctgggcgacagagggaagactccgtctcaaaaataaataaataaataaaacaaaacaagaaactacgtaactgtacctaaccaattattgaatgtggttttcctcgttatgcaccttataaaactctttccgtcaaaccccttcaatagaccattaactacaacccatagctgggtgctctacaattttggaatcactctttgattaaattctttaatatttttgaggtgacttccataaatttttaataggagaaaacaggaactgggagcctcacggaccaaagctcttcccattcatgaacccacaccccaagtcaggattctcctctcacgaccctctcatggtccctgcacatctgggagagactccgcgctgcgggtgcagagcggccccaagagggctccaggccagggcacaatcacagcgcagggaagagacaggacgcccggggaccgggtgtcagcgcagcctccatcttatggctgaaccggactgaggtcgagctaggcaagaactcggggcacagatgtggagctgactgcggggaggcctgagtcccgccacagccacttcccaccggttccaagcagcccgggccactctctcagtgtgtcggacccggcacactcaccatttctaggcttccagggggtcctggcgacttagttgtggatctcccaatacctgcaggtcatagggccacagaggctgggactctaggagcagaggacacacagcagtaaggacgagaccttgacctccggctgcagcgagagacaaaggaccgaccacatcccggaagccgacctgtcccctccagctgcctgcctgattggacgttcccagcccagcatccctgattggataatgtttaaggccccgccctttcaggccctgagtgacagaagatgtgatcagatgctgggctgaatgaagaaagagagccagcgtaggctgcaacctttcaggcagggcttcctccctgagctgagccaggcccaccccagagcatgcgaatattctatctcttctttactctctctctttttaaatgtattcgaaatgtgaacgaatatattttactgccatgttaataatacataaaacttttgttccagagtaaattaatttttactttagtcatagtgtgttatcaatactaaaggccgggcgcgatggcttacgcctttaatctcaacagtttgggaggccgaggagggcggatcactggaggtcagaagttcaagaccagcctggtcgatagggtgaaaccccttctctactaaaaatacaaaaattagtcgggcgtggtggtgggcgcctgtaatcccagctactcaggaggctgaggcaggagaatcatttgaatccaggaggtggaggttgcagtgagccgaggttgggccattgcactccagcttgcgcaacaagagtgaaacgccatctcaaaaaacaaaacaaaaaaattaaacttattttagtaaaaccttataaataaatccatcaaatttgtcacttttccaacactctacattttcatatatattttataatctcacatttttttaactttttctattttattttaatagatttttttaacttgaaacaaccttaaattattattattattattattatggttgttgttgttttttgagacagagtcttgctctgtccaccaggttagagtgcaatggcatgatctcagctcactgcaacctccgcctcctgggttcaagcaattcttctgcctcagcctcccgagtagctgggattacaggcgccgtccaccacacccagctaatttagcatggtgacctgaacttgtagttaccagctattcaggggctgaagtaggagtattgcctgagcccaggaggttgtggctgcagtgagccctgatcaagccactgcactccattctgggtaacagagtgagaccctttcttaaaaaaaagacaaagcatataaccttaaacttatgggagtttggggctttttatttttgtcttaaattattatatttcaatagttttggggtatacgtagtatttggttacatggataagttcttttgtggtgatttctgagatttacgtgcaccaatctcccaagcagtgtgcactgtacccaatgtgtagtctttcatccctcaccccctctcccacccttcccactgagtgcccagagtccattatataattcttttatttatttatttatttattttctgagacagggtttcattcttgttgcctgggctggagttcagtggtgtgatctcggctcaccacaacctccacttcccaggttctagcgattctcctgcctcagcgctcccaagtagctaggattataggcatgccccaacatgcccggctaattttgtatttttagtagagacagggtttctctatgttggtcaggctggtcttgaactcccgacctcaagtaatcgcccgcctctgcctcccaatgtgttgggattacaggcgtgagtcaccgcactcagacccattatataatttttatgcctttgcatcttcatagcttagctcccacttataagtgaggacatacaatatttgggtttttatcccctatttcttttttttttttttttttgagatggagtttttttttgtgatggagtttgctgtgattacaggcatgagccactgtgcctggcctattttttgatgttttaattatggtcttttctgtttgtttgtttttgagatggagtctcgctctgtcgcccagactggagtgcagtggtgcgatctcggctcaccgcaacttccgcctcccgggttcaagcgattctccagcctcagcctcccgagtagcaggcattacagacacacgccatcgcgccctgctaattttagtatttttagtaaaggcgtggttttgccatgttggccaggctggtctggaactcctgacctcaggtgattcacctgtctcggtctcccagagtgctgggattacaggcatgagccaccatgcccggccaatcatggtcatttttgcaagagtaaggtggtatcacattgtggttttgatttgcatttccctggtcattaatcattagtgatgttcagtattttttttttctatgtttgttggccatttgtgtatcttcttttgagaattttttaagtcccatctgtctttgtttttgttgcatttgctttgggattcttggtcatgcactctttgcctaagtcaatgcctggaagagttttttcaatgctttagaattcgggttgtttcaggtcttagattaaagtatttgatccatcttgggttgatttttgtataaggtgagagatgaagatccgtttttttttatttttttttatttttttgagacaagtctcgctctgttcccagactggagtacagtggcgtgatctcagctcactgtaacttctggctcctgggttcaagcaattctctgcctcagcctcccgagtagctaggattacaggcacccgccaccatacttggctaatttttttttttttttttttgtatttttagtagagacagagtttcaccatcttggccaggctggccttgaattcctgacttcatgatccaaccacctcgacctcccaaagtgctgggattacaggtatgagccactgcgcccagctgaagatctagttttatttttcaatatgtggcttcccaattatcccagcaccatttattgaatagggtgttctttccccactttatatctttgtttactttgtcaaagatcagttggctgtaagtatttgggtttatttctgatttcactattctgtttcattgggctacatgtctatttttatacccatacaatgctgttttggtaactatagccttgtagtatagtttgaagtcagataatgtgatgccttcagatttttttgtgtgtgtttttggttttgttttgttttgttttatttttcttagtgttgctttgactatggaggctctctttttaatttatataaattttaggttttttttttagttctgtgaagaataataatgttattttgatggaaatcacattgaatttgtagattgcttttggtaggttgatcattgtcagagtaaaatcgctactcatccataagcatgaaatacatttccatttgtttttgttgtctatgatttctttcagcaacgttttgtagtttttcttgtaaagatctttcaccactttggctagacatattcctaacttttttttttgcagctatttttaaatgatgagttcttaatttaattattagtttggtcactgttagtgtacaccagtgccaccaatttgtgcacattcattttgtatcctgaaattttactgaatttatgtatcagattgaaaagttgttttttttttctttttgagacaaggttttactctgtctcccaggctggagtgcagtggcatgatctcggctcactgcaacctctgccacccgagttcaagtgattctcctgtctcagcctccctagtagctgggattatagccactcgacaccatgcccggctaatttttgtattcttagtagagacggggttttaccatgttggccaggctgctcttgaactcctgacctcatgatctgcccgcctgggcctcccaaagtgctgggattacagacgtgagccaccacgcccagctgatgctgtttattttttgctttactctgattgctctggctaagacatccattagtgtgttaaatagaagtggtgagagtgggcattattgtcttgttccagttctcagaaaaaatcctttcaactttttcccgttcagtgtaatgttggctgtttataatagagagctttttttttttttttttttttttttttccagacagagtctcactcagcccaggctggagtgcaatgtcaggatctccgctcactgcaatctttgcctcctggactcaagtgattctcccgcctcagcctccccagtagctgggaccactaggcacccgccatcatgcctggctaatttttgtatttttgaacagacgagatttcaccatgttggccaggctgatctcaaactcctgacctcaggtgatctgcccacctcggcctcccaaagtgctgggattacaggcttgagccaccacgcctggcctgtcatagatggcttttatgaccttacaatatgttccttctatcccgattttgctgaggattttaatcataaagggatgctggattttgccaaatgatttttctgcttatattgatataatcatgtagtttttggttttaattctgtttatttggtgtaaaacatgtattgacttacctatgttaaatcatctctgcatccctggcataaaatgttctcgattatggtgtactatcttattaatatgctgctgtgtttggttagctagtattttattgaagatttttgcatttatgctcatgaggaacattggtgtgcagttttcttttattatgtcttttcctgatcttggtattagagtgatattggcttcatagaatgatttaggaaggattccctttttctctgtcttttggaatagttgcagtaggactggtaccaattatctgaatgtcagatagaattgagctacgaatccatcttgtcctggactttttttgttggcttttttttttttttcttgagtcttgctctgtcacccaggcgggagtgcagtggtgtaatcttgactcactgcaacctctgcctcctgggtttaagtgattctccttcctcaacctcccgagtagctggaattacaggcacaaaccaccatgcctggttaatttttgtatttttagtagagatggggttttgccatgttgatcagactggtttcaaacccctgacctcaagtgatccacccacctcatcctaccaaagtgctaggattacaggcatgagccactgcacccagctggcaattttttattactagtttaatcttggtacttgttattggtctgttcagagcttttatttcttccgggtttaatctaggaggtttgtatatttccaggaatttatcgaactcctctaggttttctagtttgagcatgtaaaggtattccatggtagctttgaatgatcttttatttctaattgagcatatttggatcatagattcaatgctgtccccatcaagctaccactgagtttcttcacagaattagaaaaaactactttaaatttcatatagaaccaaaaaagaggctgcattgccaagacaatcctaagcaaaaagagcgaagctggagacattatactacctgacttcaaactattgtacaaggctacagtaaccaaaacagcatggtattggtatcaaaacagatatacagaccaatggaacagaacagaggcctcagaaataacaccacacatctacaaccatctgatctttgacaaacctgacaaaaacaagcaatgaggaaaggattccctatttaataaatggtgttgggaaaactggctagccatatgcagaaaactgaaactggaccccttccttacaccttatacaaaaattaactcaagatggattaaagacttaaatgtaacaccccaaaccataaaaactctagaagaaaacctaggtaatgccattcaggacatagacatgggcaaaggcttcataactaaaataccaaaagcaatggcaacaaaagccaaatttgacaaatgggacctaattaaacgaaagagcttcttcacagcaaaagaaactattgttggagtgaacaggcaacctatggaatgggagaaaatttttgcaatctatccatctgacaaagggctaatatccaggatatacaaagaacataaacaaatttacagcagaaaaacaaacaactccatcaaaaagtgggcaaaagatataaacagacacttctcaaaagaagacatttacgcagccaacaaacatatgaaaatatgctcattatcactggtcattagagaaatgcaaatcaaaaccacaatgagataccatctcatgacagttagaatgcaatcactaaaaagtcagaaaacaacagatgctggggaggatgtggagaaataggaacactttcacactgttagtgggagtgtaaattagttcaaccatagtggaagacagtgtgagaattcctcaaggatctagaatcagaaatagcatttgacccagcaaccccattactgagtatatacccaaaagattataaatcacatgaacacgtatgtttattgcagcactattcacaatagcaaagacttggaaccaacccaagtgcccatcagtaatagattggataaagaaaatgtggcacatatacaccatggaatactatgcagccataaacaaggacgagttcatgtcctttgcacggacgtggatgaagctggaaaccatcattctcagcaaactaacacaagaacagaaaaccaaacattgtatgttctcactcataagtgggagttgaacaatgagaatgcatggacacaaggaggggaatatgacacactgggacctgtcagattgaggggggctaggagatgaatagtatcaggagaaatacctaatgtagatgatgggtggatgcgttcagcaaaccatcatggtacatgtatacctgtgtaacaaacctgcacattgtgcacatgtgtctcagaacttaaagtgtaataataaaaaagaaaaaaaaaagaatgctgaaggcagtttcttttacttaaaataaaatgactcaagaaaatgacacataatcatataaacatatatataaacaaatttttttgagatggagttttactcttgttgtccaggctggaatgcagtggcctgatctcagctcactgcaacccctgccttccagtttcaagcaattctcctgcctcaacctcccatgtagctgagattacaggtgcctgccaccacgtctagctaattttttaaaattttagtagagatggcatttcaccatgttggccaggctggtctcgaactcctaacctcctgatctgcccacctcagcctccgaaagtgctgggattacaggcatgagccactgcatctggccaaaagagaaaagaaaaaaaaggattactttcttggatagacatgcacatacaaaaaaatgaaatttcttagcataatcataatggtgcagaaaacatttttaagtattgtctgtaatttgaaaaaaatttagaaaattattaaaattttgagagtaaaatctttgtatgcaactgaaatttatcttctaccagattaaaatatattgttatatcttttagaggttttgtgtaatttccaaggtaccacaaggtaccacaaaaaaactgtaatctgtatagatatgcaaaacaaaataagaaaaaattaaaagcatatcagtacaaaaatcaaaatgacacaaaggaagacacaaagagagaaaattagagacgaagatacaacaatcaaataaaacaataaaataacattactaagtctttctgtttcagaaaattatttaaacatgtatataaaatgagctttccaattaagagacatacttgtaataaaggaattagataattttaaaaaccaagatccaacttgcctttctataatcgagtcatcagagatctaatgataaaaaagactgataatagcaggatggatgtagatattccatgcaaatattaattaaattagagcagaagaggtcaaaataatgttactttagctgtttatttatttatttatttatttatctatttatttattttgagatggagtcttgctctgttgacaggctggagtgcagtggtgtgatctcggctcactgcaacctctgcctcccaggttcaagagattctcctgcctcagccttccaagtagctgggactacaggtgcatgccaccacagccagctaatttttgtatttttagttgagacggggtttcaccatgttggccaggatggtctccatctcttgacctcatcatctgtctgccttgtcctcccaaagtgctgggattacaggcatgagccactgcacccagcctacagtagcatatttccataccccaatttgtataataaaaacaaaacaagacagcataatagtaagagaacagagaacttgaagacaagtataaaacaatcattcctaacagaggtacagagaacactcctcaacaacatcaggatacacagccttcccaacagctcataaaacattgtccttgatagaccatctgttaggccaaaatagaagtcttaacataatttttaaaactaaatttatatggattactttctatgaccaaaatgaaatgagagcatgaaacaataatagaaaaaaactgaaaaagttataaatgtatagaaattaacacacttaggagcatgctcctgttcaaaggttgagataaatattttgaagatatccatactcttcaatgtaaactacagattcaatgggatgttctttaaaagttcacactacattttgaagaaacagaaacagcaactccaaaagtatacggaatctaatgagacaataaaatacccaataatcttcaaaaaaagaaataatgttaaaggcattacagttcctgattttaaaactcattacaaatctacaaaattaaaacaatttggtgtgagtataaaagtaaaaatgtagactaataaaaaccaatgcagcacatatataaaatttaacatatatagtcatatgaagaattatttacatactcataataattgcagcattgttacaaatttttagtagaggccaggtttcgccatgttgcccacgctggtctcctaggctcaagtgacccacccatcgctgccttccaaactgctgggattatacgtgtgagccacctcacccggcccaatttattttctttttttaaggttttttttctgaaaattttatgatattttggatgggaatgtattgccctgttttgtatacattgtaatctttaattgatatttggacattttttaaaaagctagctgtcacgatcttttatcatgtagctttgtcctggtatagtctgaaaacaattgtctttgctagagattctgggagtctttcgaacatgttcttagtatgtgtcttgtctgaaatttggtgtttttttttttagttaaagaagtttatttgtctttcttcttaatagtcttcacttgctacacctgttccctgtctgtggcactgcagcctctctgctgctgttacatttacctctggtctctgcagacccgaactgtcattccaaagtataccaccatttcattcagcactttgtcactttgtgacctccatctctgccaccatgaccactttgttcatgggcctattgggcaatgacggggtggctggggaaagacgctgagtgatgtcaacaaaacaggtcatcctatccacttgattattaaaaatctcctctgctgaggtcacccattggtgagcactcacatgggatacaaatatcttcacagtttttgaccactcaggaggttcattcacatacctcttccccaaatttctttgtcaccaatttttcaatcatgcttcttccaagtacctggcaatccagccaaacaattggctaaagcccatgattcagtatgtaatcacacatctggccatttctccttccatgcaaagtgcacaaccaggtgcactgctcaaagttctgcccactgggaagatttcccttcaccactgtctttcagggatgtcctagaaaggaactgtagtgccgcagctgtgtccactttcaggtggtgcctgcttattatacagaatcatctgtaaacgaggccatagtcttttcttcctctgtcaaatgatcacagggaactcccccttaggtcatcagtgcaggctgggggagagaaggcaggatggcagaagtggagaccatgggcatttgagccactttctcatttgtgccttcagaaactgctcaagcccaatcacatatatactacctccatttgatgatggaatgctgttttgcatgacctactttatggttagatgggtcagaaagcacccagttcatgataggcagttcaggtcgcatggtgacttgacaacccatagtcaaaagttcagtttttaccaaagcccagtaataggccaagagttgtctctcaaaaggagagtagttatctgcagaaaatggcagggctttgttacaaaatcctacaggctggccaggcacagtgtctcattcctgtaatcccagcactttgggaggccgaggcaggcagatcacctggggtcaggagtttgagaccagtctggccaacatggagaaaccccatctttactaaaaatatgaaaattagccaggcatggtatggtggtgggtgcctgtaatcccaactactcaggaggctgaggcaggagaattgcttgaacctgggaagtggatgttgcagtgagacaagataatgccattgcactccagcctagatgacaagagcaagactccatcaaaaaaaaaaaaaaagaaagaaagaaagaaagaaagaaagaacaaaattctagaggcctctgctgtgattcacctaagggggcctgccaaaggctacaaatagcatccttattttacactgacaactcaagatccattggatctcctgggtaatatggcccaagtggcagagcagcttgcacagcagcctggacctgttgcagagccttctccttttctggaccacactcagaactggcagctttttgggtcactcaataaatgggccagagtaacacacccaaatgaggaataggttgcctccaaaacccaaataggcccactagacattgtgcctctttcttggttgtaggatgggccaaatgcagcaacttaccttttaccttagaaggactatcttgacaggccttggaccactggacccctggaagttttactgagctagaaggtctctaaattttagtcagacttattttccatcctctggcatgcaaacgtctcatgaataagtctggtgtgtttgctatttcttgcttactggattcaatcagcataatgtcatcaatgtaatggaccactgtggtatttgcaaaagcaaaaagtgatagaggtgtctttgaataagattatgacacaaagccagagagagcgataggatagtaaaggtatattgccggccttgccagctgaaagcaaattgcttctggtgggctttatggacaggaattgagaaaagggcatttgctaagtgaatgtctgcataccaggtaccaggagatgtggtaatttgctcaagcaatgaaactacatctggtacagcagctgcaattggagttaccacttgattaacctcatgataatccactgtcattctccaaaatccatctgtctcctgccaaatgagttgaacgggatggggtgggaatcacagcctctgcgtctttcaagtccttgatgctggcactaatctctgcaacccctccacggatgcaatattggttttgatttactatattcctaggtagaggcagctctaatggcttccatttggcttttcccaccctaatagccctcaccctactactcagagagccaatgtaggagttctgccatctgctaagtatgtctatgccaattttgcattctggaactgggtaaatgaccacagaatgagtcttgggacccactggatcaaccatgttggacctgagctaaatttctattaagtacctgacctccataagcttctactttaactggaggaccacagtgatgttttgggtcccctggaatcaatgtcagctcagagccagtgtttaggagtccccaaaatgtccaatcatttccctttccccagtgcacaataaccctcataaaaggccagagatatccttggggaaagatgagagaaagattcactacataaattgtcagtagtgtagtggggtttttcctcaagggaatccggcctcccctttattcaaggggttctgggtctgtaaactggctcaagtctggaaattgattgaggggccatgattctctgtttttatgtttcaaattagtcttttgtccattcaacctagaatttttctgcttgcataaattaagtaggaatgcagtaggtttcctatcaattttacttctaagaacaccgtgatgaatcagccaatgccagaactctacacaagtcagactattctgattgccattttgcctctgctgtccattacagtagctatgcccaccttgcctttgatggttggcccctgccaccatgggatccaattattcccactgtatttaaattttgtagttgagtgaccggggttcccactgttagatccgacatgcagagaagagcaattataaggttcttcaaagattcaggtgctgccttcacaaatctattttgcaaggcaatggtcaagggtatatcttctggaccttccctgctagaattagtaggtctaaagtgactaatccactccagtatcccaatctccctaagccttttgattcctccctctacattaaaccaagggatatcaggcatttccaggtccctcacagtgggccatcttttaatctatatttcagctaaccgagcaaataaactattaaaaccttttttaattccccaagctgcaacattaaatgcagtgttcctacttagttggcccaaataaacaaattcagccttgttcaactctatgttccttccaccattatcccacacccttaatattcatccccaagcctgttctccagatttctgtttatataaattagaaaactcaagcagttctttttgagtgtagtgtacctcctcatggggcacactctcaacctcacctctaggggtctgctgggactttagtctacttatatgcctagaagcaaacaggggtgttgagggtggctcctgaaaagaatcaacattattttgcctgacaactgcctcaggggaggccatcagtgttgcctcaggcagtgcagagtttatctcagacaaaggtggaaaggctaatggcagcacggatcagaaaggggatgttgccactactggggatggggaagctctttcttctaacaaaaaaggctcatcagagtttacaaactcagagcccctagcttcatcagggtcctcccacacgtccccattccaagtggcagggtcccattcttttccaatcaatgcgctcactctaacagtagacacctggcgaggctgtgcatacaccttttgttgcaggtcagccactagcataataagagtttgtgtctgtttttgcacaatttcagctctttctctaccagagatgagactctcacacagggcaatcttagcagatttgaggctcagtaactgcttctgaagccaaaagatagaatccctgagttcatcattttctatcatcactttgttcactgaacttatgacaaccagcttcattatgttccttggttctccacatatggtcaaacctccgcctcccagttcaagcaattctctgcctcagactcctgagtagctgggattacaggcacccaccaccacacctggctaatttttgtatttttagtagagagggggtttcaccatcttgaccaggctggtcttgaactcctgacctcgtgatccacccacctcgccccccccaaagtgctgggtttacaggtgtgagccactatgcccagctggtcaaaggtattatgtatagagtcactaaactccttgcctctcatgaatgataaatcaggagtgtcaaatgcatttattttacataactctctaaacagttcatcccaaagactatcagtgttttccatactattagaagtagatccttaacatttttgggtctaatcatattaagcagccaattccagaaaccccagaatcaaaaaaggaacttcatccttaatattctgttcctctagaaccactcctggtacaaaaatctgtattagtcagggttctctagagggacagaactaatggaatatatatatccctgtgtgagatatgtatgtgtatgtgcatatatatatatatatatatatatatatatatatatatatataaagtatataaaggggagtttattaagtattaactcacagaatcactagacccacaataggcattctgcaggctgagaatcaaggagagccactccgagttccaaaactaaagaacttggagtctgatgttcaagggcaggaagaatccagcacaggagaaagatgtaggctgagaggctagaccagtcactcttttcacatttttctgcctgcttacattctagccactctggcatctgattagattgcgcccatccagattaagtgtgtgtctgccttttccagccaactgactcagttgttaatctcctttggcaacaccctcacagagacacccagatttaatactttgtatccttcaatccagcctagttgacactcagtattaaccatcacacctagttaagagagtcaacatctctccatttggctgagtccaggtgaaacagtcatcaccatttttctaagctgaatccagaaatgagtcagcattccatcagtgggcagattcacatatcagtcacaattccaactgtgaatttttttggtgtgtgagatttagaacctcaccagtgggctctgtttatatgtgaaggtaacaatactaactgttagctttgtctgcatattgaagtcacaatctcacctgcgtgtggggccccgtgataaaactttgcattgccagagggctttatgtaatttccataagtgtcataatcttctgtgactctcatacaggtagaagacccaggaccctaccagtttactcaagcctagctataatagtcaacatatattttattggctggatccaggtatgagagttatcaatgtgcctgtgagctaactttataaataggtcaacatcacacctgtggctggatctacatatgacattccagctgtggactgtgtccatgtacaagattcaagaccttaccagaagtctctgtccatgtgtgagggtgacactcaacttttggcaggatgagcatacaagagtcacaatctcacctgtgtgctgggtgcagttatatgtcaaaatcccacctgtggaaaagaaacaagctaagagagtcacatattttaagttctaggctaaagatatgttacaatatgccttgtgggcaaggctcaggaaagagagttacatcacctgagtgatgtgactggtgatatgtcacaatgccttctatgggcatggctcaggcaggagttttacattatttttgtgttggccctatgatatgtcacaatccccctccatttgcgtgacttagagaaaatagaagagtcacagcacctaaattatgaccacagaggtatatcacaatacctcctgtgggcagagcctaagatagagggtcacatcacctgcaatctgggctcagtacaatgtttcaatctcccctgaggccagagcccaggcagaagaggagaattatatcacctaagtgcttgggcctgtggtatgtcacagttctttttttttttttttttttttgctggggggtaggcagaatgcaggcaaagtatttcacaatacctactgtgggcagggcccaggcagtacagtcacatcacagaggtgctgggctcagtgacatctcacagtgactttgtggacagggcccaggctgaaaataagagtcataagacctaagtgctgagcccagtgaaatttcacaatagcctctgtgggtagggctcaagcaagagagtcacatcacaatcttttctgagagctgggcccaggcagggaagtaaaatcactcaggtgctaggcaaaagtatatgtcacagtcatacttgtgggaagatctagggctaagattcacaattccacacatgtcccagcttcaggtaaaagcgtcaacacctcctgtgagttgcatccaagtacctgagtcacagtatcaatgatgaactggatccatgcatgagagtcccaattccacctgtagactgtgtgttgtgttggccctatgatatgtcacaatccacctccatttgcataacctagagaaaatagaagagtcgcagagccttctgtgactcgtattagagtcaaagccttctagttgtgttgaatcctggtcttagagtcaccatccacctgtagacaaaatccacataaaacaattacaatcccaactttcgactgtgtccaggtgtgagattcagaagctcaacagttttctgtatccatgcaggagggtgacaatttttactaggcgctggaagtgcatatgagaattaaaatctcagcttgttctgggtcctcttatgacactctctgtaccacccaagggctttacattgattgggtgagagtcacaatcccctgtgagatattaccactggtataaattcatgatcttgcctgttgccctaagtttgggtatgagagtcaacatctctcctattgtctgggtccaggtatgaaagtaattgctgtgcctcttagttgggttttatgagtcaccctcccacctgtggctggatccacacatgacattaaaaattccaactgtggactgcatctgtaagtgaacctgcaggttctgtccatgtgtgtgggtgacaattcttactctttgctgggtgtgcatttgagagtcacaatctcaaattttgctgagttatgtaatgacactttctgtacaacccgagggcattatacaatattagtgagcgtggtaatcctctgtgacatttatacaagtagaaaacccaaaaccttacctgttgccctaagcctaggtacaagcagcaacatatcttctattggtgggtttattgggcaagtgaattgggttcagaaattttccaccatccaactggtgtaataggttcatatgtgagactcaggccctcaccagtaagctcggcctatgtgtgagggtggcaattcaaactgttggctaggtgtgtataggagagtctcaatgtcacctgtgtactcagtcttgtaatgacactctgtattgcccaaaagctttatactatatgtgtgagtgtcataatcttctactacctgcctacaagtaaaagacttagaccccaaagcctagctaccagagtcaacatctctcttattggctgggcccatgtttgacagtcatcaccattcctgtgagctgaatccagaaatgagtcaccatcccacttctggcaaggtatacatatgacagtcacaattccagctgttgactgcattcactcatgagactcaggacctcaacagcagtctttgtccatgtgttatagtgacaatagtaactattgtctgggattgcatacaagaataaaaatctcatctgtgtgcttgaccacgttatatttcacaattttacctgtgggaaaggctaataaatgagagtaacatcaccataattcttcacctggaatatgtctcaatctcccctgtgggcaaggcccaggctggagaatcagatcacttgcatgcagggcccagtgacatattatattttctctaggcacagcccaggcaggagagtcacaacatttgggtgttgggctcagagatatgtcataatccctttttgggtcatgtctcctgcaacagaggagaggcacattgtgtagaaaattggtccagggatttgtcacaatgtcccctttgggtggtgcacaggcaggtgaggagagtcacatcacccagataatggaactagcaatatgtcacaatgcccccgatggaagggcaaagacaagaaagtcacataacctaggtaagaaaacctgacatatgtcacaattcatgctatgagtagggatcatggaaaagaggagagtcacataacctaggggctgcacccagatatatgtcataatcactgcagtgggcagggcccaggcatgcgaatcacatcacataaatgctgggcttagtgatatgtcacaatccccactgtgtacatgtcccagaatgaagtaaagagtcacatcatctacttgttgggaccaaagatatgtatcaatgacacctgtgggcagggaccaggcagaagagccacagcacctgtgtgctggaccctgtgataagttactatttatctgttggcatggcccagtcagaagaggcaaatcaaaccacctgggtgctgggcccagtgatatgtcacagtgtcttccataggcaaagcccaggtaacagaggagactcacatcaaacagttgatgggcccagagatatttcacaatgctccctgtgagcagggtccaggcaggaggctcacatcacctttgtgctgggccactatcttttgtgtgagcagaacataggaaaatgataagcattggctgggtgcggtgtctcatgcctgtaatcccagcactttcggaggctgaggagggtggatcacctgagatcaggagtttgagaccagcctgaccaacaaggtgaagccccatctctactaaaaatacaaaatactccaagtgtggtggcaggcacctgtagtcccagctattcaggaggctgagacagaagaattacttgaacccaggagcagaggttgcagtgaccggagattgtgctactgcactccagcctgggtgatggagcaagactccatctcaaaaaaaaaaaaaaaaaaagagagaaccgtcacatcatctgagtgctgagcccagatatgtctcaatctccctgtgagcagaatccattcaggagagtcaacatacatgggtgatgggcacagagatatttcataatgtccgctgtaggaagggcacaggcagaagtgtagcatcacttgagtattggacagtgcaatatgtcaaaacagccaatgtggtcagggcacaggcagaaatcacataacctgggtgcagggcctgacagtgcatcacaatgttctctatgggcagagccaaggcaggagaataggtcacatcagctaagtgcttggccaagtgatacgtcataatccctcctgggggctggaccaaggctgggaagtcagattgctcagattctgggcagaaagatatgtcagaatcacaccagcaggaagatcctgaaatgaaattaacaatctcacacatgtcccagtttcaggtttgggagtcaacaccttttgtaggtttggtttaagtacctgagtcacaatttcaacaatgggctggatttgtacacaaaagacccaatccctcctgaagactgtgtccccttaatgaagccacagcctcacagctgtggggaatcttggtctgagagtaaccaaccagcctatggatcagatccacatataagagttatttcttcaacttcccactgcctctgagtgggagattcagagcctcaacagtgggttgtgttcatgtggaaggatgacaatctttactattggctacctgtgcataagagtgtcacaatattacctgtgtgctgggccctatgaggacagtctctctactattcaagggctttatatgctattcacaagagtcagaatttgctctgagacctccatgctggtatgaacccatgattgtactcatggccctaagcccatgtatgagagtcaacatctctttaattgacttggtccagagaggagattactctgctgcctatgagatggttttagaaatgagtcaccatctcagttgtggtcagatgtttacatatgacagtcacaattccaactgtaagctgcatccatgtatgaagttcaagaactcaccagtactctgtgtccttgtgtgaatgcaataatcctaataattggtggggtgtgcacacaaggtaaacagtctcacctgtgtgttgggcctgtgatgacactctctgtatcacctgagggctttatacagtatgtgagggagtgaaaataatctatgaccttcctacaaaaaggagactcaggatcttacccatttctctaagcttagctacaagagacagtatctctcctggtgactggtatgagagtcactattgcacctgtcagccaggccaagatgtatgtaacaatcccatttgtcagtagagaatgagcaggatgatcacatcacccgagagctgggaaagggttatgtcacagtcatttttgaggccagggaccagggataaaagaaacatcaccttagtgctaggccaagggctatgttccactgttttctgtgggcaaggtgcaggcaaaacaaactcatcaccttgttgctgggcccagtgatatgtcacaattttccctgtgggcaaagtggaggctaaaaacaagggtaatatctcttaggttatgatgcagagatacatcacaaggcctcctgtgggcaggccacaggtagaaatcgccaatttcctaggtgttggagcccatgatatgtcaaaatacacaatgtatgcagggcccaggcagaagagaagagtcacataacttaggtgctgagcctagcaatacatcccaatttcttcttggacggagcccacacacttattacccaggtgttgggtctagctatatgtcaaaatattccctgaagggagagatcagggaggagtgtaacctcacctaggtgagaagatcagagatgttgccgattctgtgtaagtctcaggaataagagaagagtcaggtatcctagaaactcggctacattatatgttgcaattacccaagtgggcaggaatctcatgagaagagggtcacatcatgtagctgctgagctaaacgatgcatcacaattcccactgtgtattggtcccagaaagaagaggagagtctcatcatctaggtgatgggcctggaaatctggcatatgcatcctgtgggcaagcaacaggcagaagtatctcagcatgtctgtggtgggcttggtagtaagttactctcccttctatgggcatgacccaggcagaagaagtcacatcacctaggtgctgggcccagagatatatcacaatctcttttgtgggaaaagacaaggtaaaagaagagactcacatcaaatagttgatgggtctagagatatgttacaatctttctgtgggcagagtctaggcaggagactcagtcactgtagtcctgggcacagcactatgtaaaaatgctttattttggaagagccaaggcagaagaatatcacctgtctgttagcctagcaatgtcacaacatcccctgcaaaccaaaccttgaaagaagagtagagtaacctcagctaggtgctggtcccaattatttgtcaaaatccttcttttgagcagaaattggtagaagaggattatcaaaacacaaagttgattggtgcatagatatgtcacagaaaacctagtaggcagggccaggccagagagttacatcacctgggtatcagactcagctacatgtcaaaatggcccatatgggcagggcacaggcaggagagtcacataacctgaatgtggtgccaagtgatatgtgacagtgctgcctgtgggcagcatgaaggcagaagagactcacatcacctgggtgcaaggccaagcaatatgtcacaatgctcccttttggcaatgctaaggcaggagcatgcagctacatcacctaattgctgctttcaatgaaattttataatttcagctctgggctgggcccagggagtagagttaaatcagtcacatgacaggcagaatctatgtcacaatcacacctgcaggaatgtccaggtatgagattaacaatcccatatgtatctaggttcgaggtgtaagattcaatagctcatgtatgttgggcctacgtaaagagtcacaatctagatggtagactaatctgtccatgagacccttaattcctcgtgtggactgtatctccttaatgaagtcacagcctcagagttgtgttgaatctgagagtcacaaacccacctgtgaatgagatccaggtatgatagtcaattttctaacttttgactgcctccaagtctgagattcagaagctcaatcattggctgttttcatgagacagaatgacaatctttactgttgactgggtgtgcatatgagtggcacagtctcacctgtgtgctgggctctgttggaactctttctgcaccacctgaggactttgtagagtgtgcataaaagtcacagtctgctctgagacctttctgctagtatagacccatgattatatctttgaccctaagttcaggtataagcatagttgtcagggtccagattagagagtcctcactctctagtcggcagggtctagattggagaatcttcacctgcctatgcactgcatttattaatgacaatttattaattgtggccaaatgttaatatatgacagtaacaaatcgaactttgaactgggtccacctgtgagattcaggagcttaccagttggcttttgccatgtgtgagggtgacaatcctaacagttggcagtttctgcactttagaaacaatctcacctgtctgctaagctctgtgaagacactctttgtgccactcaaaaggtttatgaaacacaccaaagattggtaattctttttttttttttttttttttttgagaggaagtctcatctcactctgtcacccaggctggagtgcaatgacatggtcttggctcactgcaacctctgcctccaggtttaagtgattctcctgcctcagcctcttgagtagctaggactacaggtgcatgctaccacacatggctaatttttatattttcagtagagacagagtttcactatgttggccaggctggtctccaactcctgacctcgtgatccacccaccttggcctcccaaagtgctgggattacaggcatgagccacactgcccagtcagattggtaattctttatgacattcatacaaagaggaggcccaagatgttacttttttccctaagctacaatacaagagacactatctcccctattagctgattccaggtatgggaatcatcatagcacctatgagttggaccaggatatttgtcacaatcccaagtataagtagaaaatgagcagaagagtcgcatcacctgggtgctgtatgagggatgtcacaacatttcctgggagcagggcaaggcagaaaggtcacataacctgggggctgagcccagtgatatttcacaatgctccctgtgggaaaagacctgccagaaaagacacatcacctggttactgggcccagcgatatgtcacaatcttctctatgtgcaggatgcaggcagaaaaagtgtcacatcactttggtgatagaggcagacatatgtcacaaggccacctatggacagggcttattcagtagcctctgacccaatcctgtaggtgttgggtccagtgacatgtcacaataccaaaaatattcatggctcagcaaaagaaaagatttacatcacctaggtgctggatccagtgatatgtcacaatcctcttctttggcatggcacaggaagaagtagagagtcacaccacctaggtgttggaccaagccatatgtcacaatacacaataaatgcagggcctatgcaaaagaggagagtcagatctcttaggtgctggaaacagtggtacatcacaatttctcctctgtcagagccacatcacctaggtgcttggtccagtaatatgtcaaaattcccttgagaggtgagcccaggcaagagagtcacatcatttcggtgagaaccccacagatgtgtcactattttccctgtgaatagcgctgaggaagaaaaggatagtcacatcatttaaatgatgggcccagagatagattacaatggctcctgggtacaaaaaccaggcagaataattacatcacctgtgtgctgggcccagtgataagtcactttcccttgtgtgggcatggcttcagcaggagagaagagtcacatcaccaaggttctggttccagagatatgtcacaatctctcctattgacaaaacatgggtaggagaggagagtcaaatgaagcagctgatggaaccagagatatgtcacaatgtccccccgcccctcatagggagagtacaagcaggtacctcccaattctttaggtattgtggtcagggacatgtcacaatacttaaaaaatgcagaacccaggcaataaaacagagtcacatcacctaggtgctaggttcagtgatacgacacaattcctaattcaagagggctcagggaaataaaaagagtcacataaccaaggtgataaaggtaaagatatgtcataatactcctgtgggcagagtccattcaggagagtcacattaccttgatgttggacccagccatatatcacaatgcacagcatatccagggctcaagcagggaagaaaaatcacatcgtctagttgctgggtttgatgatatgtcacaatcacttgtttttgcagaacccagacagaaaagaagagtcacatctcctagttcatggatgcagagataagccaaaaggctccttgtgggcaggacccaggcacaaggctctcatgccctaggtgtttgtctcagccatacgtcacattaccaaatatatgcagggcccaggcaaacaaggtgagtcataacaccttggtactaagtttaatgatatgttacaatccccacttttggcagggccaggacgcacacacacacacacacacaaacaaaggcacatcacataggtgattaaaaaaaaaagatatgtcataatatccctgtaagcagggctcatgcataagagtctcatcacctaggttttagacccagagatttgtcacaatacacaatttatgcaagactcagacacaagaggaaagtcacgtaacctaggtgctgggtccagtgatacattagaatctctccttgggtagagtccaagcagtagaaaagagttacattacctgggtacttgctccaggaatatgtcacaatacctcctgaggaaagagtccagaaaggggagtcacatcacctaattgaggggcccaaagatatatttcccagtgctccttgcaggtagagctggggataatcaaaagagccacataacccaggggctgagcccagctatatgtcacaactaccctaggtgcaagtctctggtatgagagaagagtcacattacataggtactgggccaagtaatatgtcacaatctccactgtaggaaggtctcaggaaaagagaagagtcacattatctgggtgatgagcacaggaacgtatcacaattaccctagacagaagcgttacatcacctgtgtgtgaggtccagtgataagccactcttccttttgtgcacacggtccaaacaaaagatgaaagtcacatcacctaggtgctgggcttccagaattgtctcaatccctcctatggtcaaagccaatttaagaaacaagaattacattagctgctctgcctatggagcagccattttttttgtttctttgtttctttacttctctaataaacttgctttcattttactgcatgggctcaccctgacttcttggggtctggattaaaagcccttttcagtaacagctttctggcaaactataaagggactatactgaggagaaaactgaaccaaaggaagtaaactgcagcaccaattagccaacttggggtaactagtggagtacattttaccagggtaaaaaatgggattgggttagaggcccaacatagaagagttacagtctctcctaagaaatactgggttaaagacctctcttaataaaaagcttgaggcccaagttaggaaggttcaagtcctttctaagatttagggggttggccgggcacggtggctcacgtctataatcccagcactttgggagactgaggcaggtggataacctgaggtcagaagttccagaccagcctggtcaatatatagtgcaatcctgtctctactaaaaataatttaaaaaaagcctggcgtggaagagacacctgtaatcccagctactcccaaggctgaggcaggagaattgcttgaacccaggagacggaggttacagtgagccaagattgtgccattgcactccagcctgggcgacagagcaagatgaggctctgtctctaaataaataaataaataagtaaataaataaagtacagctgtcctaggactttttgtcacccacagacaattgttgtcttgattcgatcctcttcaagaggtgatttatggtccgctatggaactttgccaggtatttttaaatgcaggtttctgataactttggagactgcaacattagaacagaggaaaaattttcaggactctcatggagagctgaaatgttaatgaatatcaagcagaaaaggagtttatggcataaactgaaataatagaagacaaaaataatagtttttggcttttttcttaaaatgctgcaaatcctttttttttgtttttcagagtcaaaatatttatagctatttacagtttttaacaactggggaaggtatacttctgtaaaaaaaatttggagcatacttgtttttcgctacctgatttctccagaatgtagaaacctattggtatttttaatttatggaaatatagctatttgcatatgtgccataagcatgttttcttttgcaacagggcacaattggagacactggtaatttcaccagactttggctggaatggggtgctttccttgaagaaatcatactgaatttgtagagtcaatataagccttatgggaaacctggcctcctgctatgtctacacagtccctgtgcagggttcctgacccatggtaagtaaggaatgtcatttcttttttttttttttagacagagtttccttctatcacccagcctggggtacaatggtgtgatttcaactcactgcaacctctgcttcccaggttcaagtgatcctcctgcctcagctgcctgagtaactgagactacaggtgcatgctaccacaaccagctaatattagtatttcatgtaaagatgggttttcaccacgttgagcaggctggtctcgaactcctgacctcaggtgatcaactcaccttggcctcccacagtgctgggattacaagtgtgagccaccatgcctggccaggaatgtctctttctgacagaatcaggagcctgaagttatcttgggaccccaagaagagagaaactcacccaactcataggtatttgatggtacaaacccatggctgggcttggcttttaaaaagtcttttctgatattcctttaatggaacatagttacatcaaagccaatttttaaaacatatgtgaaaaataattatttatgctgcactttatacaaataatcaggccaagtataagactaaagctttttatgcaagtaaatcagttttaccatgatttgtctttagtagaaatggaagacaggagagagaaaaaaattatgtttcaagaactatagtacacccgttattagacactagtctcatttgttgtttttgagtattttccctgctatttagactaattctgcttattcctgtgaacacaccagtgatctctgactgcagctctaaagaaacaagagagatgggtaatataaaaatccagatcaggggccaggcacggtggctcatgcctgtaatcccagcactttcggaggccgaggtgggtggatcacgaggtcaggagttcgagaccagcctggccaacatggtgaaactctgtctctactaaaaatacaaaaataagctgggagtggtggcacatgcctgtaatcccagctactcaggaggctaaggcaggagaattgcttgaacccggcaggcggagttgcagtgagtcgagattgtgctactgcactccagccttgccaacagagtgagactccatctcaataaataaataaataaatccggatcactattctaactgtgaacacatattggaatcaggtagtaaacccatatcagctttgttccaacatctgcccttatttagtttacttgggacaattttacttattttgcttgactgttgtggattgtattgttgttgtgctctttgtgtagaaatgcaggataagcttgctgaatgtttttcttaaatagaacacttaattttgcagataccatcttttgttaagaactccagagttataaatggcccttgtcatactaatgctttctcatctggccaggcatggtggttcacgcctgtaatcctagtactttgggaggccaagagaggtggatctcctgaggtcaggagttcaagaccagcttggccaacatggtgaaaccccgtctctacaaaattagccaggcatggtggcaggtacctgtaatcccagcttctcaagaggctgaggtgagagaatcgcttgaacccaggaggctgaagctgcagtgagccgagatcgcaccactgcattccagcctaggcaacagagtgaaactgtctcaaaaaaaaaaaaaaatgaaaaagaaaaagaagagtcaaatcacctaggtgctgggcccagagatacttcatagcccctcactaggcacagccgaagcagtagaaaaattcacataacctaggtgctgggtacagcagtatgtcccaataccccttgaaagaagggtgagccagagagtaacatcaccgttgagggaccaaaaggtatgttacaatgccttctgtaggcagaggacagggtggaggattacatcaccttcatgttggactcagcaatatgtcacaatggcccatgtgggcagaacacaggcaggagagtcacataacctaagtgcgaggagccacaatatgtcaaagttgtctctatgggcagaaccaagacattgactaagtgctgggtgcagcaagatgtcactacccagtctgtgggctgagcctaggcaggagcgtaaaagttctcaagtgctaggctgaggtatatgtcacaatcacagctgcaggaagatccagagatgagattaaccatcctgcacacatcttggttctaggtatgagaggcaccacctcctgtatgttgggtctaagtgtataacccacaatctcaacagtttagagaatccatccataagagcctcaatacctcctacagactgtgtccctttactggagtcaaagcctcacagatatgctggatcttggtcttagtgtcaccaacccacctgtgaaccgaatccatgtatgaatcaattttccatcttcaactttctttgcatgtgagattcagaacctcaagagtgagctgtgttcatgtggaagaatgacaatatttactgccagctgggtatacatatatgagtgtcataatctcacctctataccatgctctgttatgacaccctttgtatcacaaaggtctcagagcacattaaagtcacacacacacacattaaagtcacagtatgctctgagacctttgtgcatctacagactcatgatcctacctgtggccccaaacccaggaataagagtcaacatctctccattgaatacatccaggtagaaaggatctaacttgccagaattagaaatgagtcaccatcccaactgtagctggatgttcacatatgacagtcacaatccaaactgtgggctgtgtcaatgtgtgaaattcaggacctctccaatgggctctgtccatctgtgagggcgacagtcttaacagttggtggtatgtgcatataagaaacacagtctcacctgtttagtgtgccctgtaatgacactttctgtaccattcaagggctttatataatatgtaaaagaatagtagtgctttatgaccttaatacatagagaagactcataatctctctcattttcctaagtctagttatgggagacagtatctcttctattggctggtttgaggtataagagcaattaatgaacctgtgagctggataaaatatatatcacaatcttacctgtcggtaggaagtgagcagcagattcacatcatgtaggttttcggcaaagatatgtcacaatctttcctgaggtcagaaaccacgcagaagtcatctcacctaggtgctcagccacagatatattacaatcccctcttaaagcagagtacaggcagcagagtcatttcacctgggtgctgagcccagtgatatgtcaaaatgctctctgtgggcacagccttggcaggagagacacatcatctggtgactgggtccagcaatacattacaacattttctgtgggcaggatgcaggcaaaagaagagagtcacatctcttaggtgatggaggaagagacatcttacaaggcccctcatgggcagggcccaggctggagcctcccatcctaaaggaatgatgcccagctatatataacaatacccaagatatgcagtgcccagggaaaacagaagagtagcatcacttaagtgctgggtttagtgatgtgtcaaaatcccccattttgtcagggcccaagcagaagagaagagtcatatcacctaggtgatgaatgaacagatatgttttaatacctctgtaggcagggcccaaacagatttgcatcacaaaagtgtttggtccaggcaggagaggaaagtcacgtcacctaggtgttaagcccagtgacatgtcacaatctcttcttgggcagagaccacgaagcagaggaaagtcacttcccctgggttctagagccagcaaaatgtcacaatgccctctgtgaaaagtgctaaggcaaaagtatagtctcacaccacctagatgctgggttcagtgatatgacacaatttcacctgtaggacctaggcagaagggtcaaatcactcagttgctgggaagagctgtatgatacaatcacacatgcaagatggtctaagaatgagattaatgatcccatacatgatctggttcaaggtacgagagtcaatacctactgtatgttgtgtctaattacacgagtcaccatctcaaaggtgaactggatctgtgtattaaatcctcaatccctcccatgaactgtgttccctcagtggagtcagaggctcacaggtgtgctgaatcttggtctgagagtcaccaacccacccgttgacgagatccatgtatgtgattcaatttttcaactttcagctgcctttggatgtgaggttcagagcctcaaaagtgggctgggttcatgtgggaaaatgacaatctttactattgtcagggtgcgcacaggagtgtcataatctcacctgtgtgcttggtccttttaggacactctctgtactatcctagggctttatatggtttgcatgagagccacaatccagcttgagattttcatgctggtataaacctatgattgtatctgtgtccctaggcccagttatgagagtcaacatctctccaattttctgggttcagataggacagccctcactttcttatgagctgcatttaaaaatgttttcctatcccaaatctggatggatggtcacatatgacagtcacaattccaactgtggactgcatccatgtgtgggattcacaattgcggtctgtccatctgtgagggtcacaattttaacaggtgcttggttgtccatacatgcaagtcaatctcatctgtgtgctgggctctgtgatgacacactgtgtacaatccaaaggctttataccataggtgagagtgtggtaatcccctctgaccttcataaaaataggaaacccagaatcttatccattttcctaagcctagctatgagagacagcatatcaactgttgtctggtttaagatatgagagtcgtcatctcacctgcgacatgggacatgtaacctgtgagtaggtagtgagcaggagagtcacatcaactgggtgcttggccagagatttgtacaatattccctgatggaagggaccaggcaggagaggaacatcacctgggtgctgagcccagtggcatgtcacaatgctccctgtgggcaaggttcaggcaaaagaaacacatcatctggtcagtaggcccagcaatatgttacaatcttctctataagcagggtgcaggtagaagaggacagtcacatctcacaggtaatagatgcagagatatgtcacaaggccttctgtgagcagggcccatgcttatgcctcccatcccctatgtgttgagtccagtgatatgatacaatacccaaatatgcagggcccaggcaaaataggaatgtcacctcaactaggttctgggtccagtgaattgctacaatctccttttttctttggcagtgcccaggcagaagagaagaggcaaataacctaggggatgaatgaaaaaatattttatagtacccctgtggacagagcccatacagaagagtcatattaacgagctgatggacccagatatatgtcacaatacatgacgtaggattggcccaaacatgagagtcacatcatctacatgctgggactagtgatacatcacaatctctctttgaacagagagtaagcagtggaggagagtcacatcacctatgcgctgcgtttagcaatgtgtcacaataccctctgaggggagagcccaggcagtattgttacatcacctgggtgctaggtcagggatatgtcacaatcttccctgaatgtggggaccagacaggtgagtcacatcacctgggtgctcagccagtgatatgttacaatgtccttctaaaagcagggcacagtcggtataatcacattacctagtttctggaagcagcaatatgtcacagtgctccccggtttgctaggcccaggctggagagacacatgacctggttgttgcacccagtgttatgtcacaatcttacctgaaggcagggtgcaggcagaggagagacacatcccctaggtgatagatgcaaagaaatatcaaaaagccctctgtagtcagggccaaggcaaaagtctctcatctcctaggttttggacccagcaatatgtcacaataacaaaattatgcaaggcccaggtaaaagaggagagtcacaccattaagtgctctgtccagtgataagtcactatccttctttttgtcaggacccgggcagaagaggggagtcacatcacctagataactaacaacatgatatgtgataatgcccctgtgggcagggcccatgcaggaaactcacatgacctagacattgtacccagccatgtcacaatagcaacgtatgtacagcccagggaggagaggagcatcacataacctaggcccagtgatacatcacaatttcttattgggcagagcccaagcagtagagaagagtcatatcacctagtttctgggtgtgacaacataaaacactaccccctgagacgaggatcaggcaagagagtcacatcacctaggtgatgggctcagatatgttataacgtccccaggtgagcagggctaaggaagaagaggaaagtcacataaactagggtcagggccaagctatatgtcacagtcactccagtggggatcacccaggcatgagaagagaatcacatcacataggagctgggcccagcaatatgtagcaatctccactgtgaacaagtctgaaaataagaaggttcacatcaactaggtgatgaactcagaaatatgtgaaaatgatttctgtcggcaaagaccaggcagaaaaattacatcatgtgtgctgggcttagtgataagtcattatcccttctgtgggcatggtccaagcagaagaaaaaagccacattacctaggtgctgggcccagagtttggcacaatatcttctatggagaaagctggccgggtgcagtggctcacacaccagtaatcccagcactttgggaggtcgaggcaggtggatcatgaggtcaggagtttgagaccagcctggccaacatggtgaaactccgtctctactaaaaatacaaaaattagccaggcatagtggcgggcgcctgtaatcccagctactcaggaggctgaggcaggagaatcatttgaaactggaaggcggagcttgcagtgaaccgaggtagcaccactgcactccagcctgggtgaaagagcaagactttcaaaagaaaaaaaaaaaagaaaaaaagaaaaaagaaagcctaggcaagaaagaagtcatcaaatagttcataggcccagaggtacatcgcaatgccccttgttaatggggtccaggtagaagactcacatcaacctgctagtgggatcagcaatatgtcacaacgctttttgagtgcagggccaaggcaaaagaggaacatcaccttgaagttgggcccagtgatatgtcacaatgttccccgtgaacaaaacctagaaagaagagtcacatcatctaggtgctggggctagcaatctctttcaatactccctgtaagcaggaacccagcaggaaaagagagtcacatcacctgtgtgatgggcacagagatatgtcacaatactttctgtaggcaggacctaggcaagagagttatatgacatggacattagacccaacaatatgtcataatggcccatgtgggcaaggcacaggcaggagagtcacataacctggttatggttcccctatgttagctgcagtaatatgtcacagtgctccctgtggggagcaccaaggcaggagaataaatttacatcacctagatcctgggttcagcgatgtgttacaatccaatctgtgggctgagcccaggcaggagagtgaaaaaactcaggtgctggacagaggcgtatgtcacaatcacagctgcaagaaggtccataaatgagattaaccatcctggaaccatgttatggttccaggtatgagaattaacacctcctttatgttgcatttatgttcaggactcacaatctcaactgtggacttgatctgtgtatgagaccttccatccatcctctagactgtgtctccttagtggactcacggtttctcaagtctcaggggtgctgaatcttggtctgagagttaccagcttacttgtacactggattcaaggatgaaagtcaatttttcaacttttgaaactttcattggttttgagattcagaatctcaacagtgggctgtgctcctgtggaaggatgacagttattactgtcagctgggtctgcatgtgagtgtcacaatctcacctgtgtgctgagatctgttaggacataatctgtcctatttgagggctttatactttatgcataagaattgctggccaggcacagtggctcaagcctgtagtctcagtactttgggagggtgaggcaggtgaatcacctcagtttgtgagttcaagaccagcctgaccaacatggagaaaccccatctctactaaaaatacaaaattagctgggtgtggtggcacatgcctgtaatcccagttacttaggatgaggcaggagaatcacttgaacccaggatgcagatgttgtggtgaactgagattgcaccattgcactccagcctgggaaaaaacagcgaaactccatctcaaaaaaaaaaaaaaaaagttacaatctggtctgagaactttatgctggtatggacccatgatcatacctgtggctctaagctcagctatgagagccaacatgtctctagttggctgagtctagataagagatttcttaccgcctatgagctgcaggaagctcatagccattgagccatatgtgaatatctagccatttcaactctggctggatattcacatatgacagtcacaatttcaaatgtggactgaatccacttatgagattaagaatctcagcagtgagcattgtctatgttggggcgggggttccaatcctaagtgttgctgtgttgtgcatatgagaaacacaacctcaactgtgtgccaggctctgtgatgacactctctgtaccatccaagaactttacacaatatgcaagtgaatgccaattctgcaaggtatttataaaaagaagacccagaaactcgtctgtttgccaaagccctgcaaagagacacagactctctgctactggctggttaaatgtattgcacctctgagctaaaccaaggtaaatgtgacaataccatcagggatatgtcacaatcttgcatgaggccagagatcaggcagtggagttgcatctcctgggtgttggacccagcaacatatcacagtgctttctgtgggttgagcccaggcaggagagacacatcacctagttgctaggcccagtactatgtcacaatcttctctatgggaagggtgcaggaaggggaaccacatagtctaggtgatggacgaagagatatttcacaaggactcatgtgagcagggcccaggcagtactctcccattccttagctgttgagcccagcagtatctcacaatattcaaaatatgtggggcccaggtaaaagaaaaatatcacattacctagctattggcccagcaatacaccacaaatttctccctgggcagaacctaagcagtagaggagtgtcacatcccctagtttctgggtccagcaatatgtcacagagcatggcccaggcaaaaaagtaacattacttaggtgaagagatgtcacaatgtcttctgtgggtagggctaagagagaagaaaagtgtcacataacctaggtggtggtgccagcgatatgtcacaatcaccccaaaagttctggaccaagtgatatgtcacaatcttctctgtgtacagtttacaggaagaaaaagggagtcacataatctaggtgatgggcttagaaacatgtcaatatgacccctgtgggcagggaccacacagaataatcacctcacctgtgtgctagatacaccgataaggtatcttggttctgtgggcttgatcgtgtgctaagaagagggtcacatcacctaggttttggtcccagagatatgtcacaattttgtctatggtcaaagccgaggtaagagaggagagtcacatgaaatagttgatgaagtcagaaatatgtatcaatgccctctgagaacagggcccaggcaggagactcacatcaccttgctgctgggcccagcaatatgtcacaatgtcttctgaaagtacgacgaagccaacaggttaatgtcatctcggtgttgggcaaggtaaaatgtcaacatctcccttgcaggcagaacttagaaagatgagaaaagtcacatcagctaggtgatggacccagcaacaggtagcaatcttcccctttgagcagagagcacacaggaaaacagagtcacatcacctgggtgatgggtgcagagatgcatcaccatgtccgaggtaggcatggctgaggctgaagagttacatcacatcggtgttaaactcagcagtatgtcacagtagcccatgtgggcagagaacaagtaggagaatgacataagctgggtttgtggcccaggaatatgtcatggtgtcccctgtgggcagtaccagaaaaggagagacttacatcacttggatgtaaggcccagtgatatgtcacaatgccccctgtaggcagcatcaaggcaggagtatggagtcacatcacctatgtgctgggttcagcaatgtgtcacaattgcaactatggactgggcccaggcaggagagtcaaattacttaagtactgagcagaggcatatgtcacaatcacacctgcagggtggtttagaaattagattaacaatttcacttatgtcccaggtctaaatttgagtcaacacctcctgtatgttgggtctaagtacaagagtcacaatctcaatggtgcacttgatttgtttgtgagagtctcaatttctcctgcagactgaaggcttactggagccacagacttacaggtgtgttgaatagatgtctgagcgtcaccaactcacctttgaaccaaatccacatgtgagtcaattttccaacttttgactgttttcacaaggaaaatttgggacctcaagagtgggctgtgatcatgtggaaaggtgacaatttttgctgttggctgggtgtaaatgtgagcctcacaatcttacctgtgtactaggctctgctaagactctctcagtaccatctgagagctttctacagtattaacgagtgttgcaaaccactctgtgaccttcatgatggtaaggactcgtgattgtacctgtggttctaagcccaggtatgagagtcaacatctctataattggctggttccagataaaagagttctcacctgctgtggagctaggttaaaaatgagtcaccatctcaagtgcagccagatgttcaacgatgacagttacaatttcaactgtagactgcatcctcatgtgagattcaagaccttaccagtaggctctgtgcatgtgtcaggtgacaatcctaatagatgatgcggtgtgcatacaagaaatgcaatgtcacctgtgtgctgggccctgtgatgacactctctgtaccacctgaagggtttatatgacatgcaagagagtggtaatccactatgaccttcatacaaggaggagactgagaatcttacatatttccctaagcctagctttgaaagacagtatgttccctatttgttgatttgatatatgagagttatcatctcacctgtgagctgaacaaatcccacctgtgcatagacagtgagcaagagagtcacatcattttggtgctaggccagagatatatcaaaatcttttctcatggcagaaactaggaagaagagtcacgtcacctgggtgcttggccagggatatgttacattcctgttctgaaaggagggcacaggcagcagagtcacagaatgtgggtgctgtgcccagtgatatgtcacaacgctccctgtgaacaggacccaggaaaagaaaacacatcaacctgttgctgggccaaatgttatgtcacaatctttcctgttggcaggatgcaggcagcagaagagagtcacatctcctaggtgatgaatgcagagatatgtcatgaggcttttgagaatggtagggctaacaccctgtttacagggaacagacaggtgcctcccatcttctaggtgtttggtctagtcatatgtcacactactcaaaatatgtggggcctctgcaacatacaagagtcacgttaactatgtgctaggtccagggatatgtcatcatcccacattttggcagggacatgacagagaagaaggacatatcacctaaaccataaatgtaaaaatatatcatagccaggcacagtggcttatgcctgtaattccagcactttgggaggctgaggtgggcggatcacttgaggccaggagctcaagaccagcctggcttacatggcaaaaccccatctctactaaaaatacaaaaaaattagctgagcatggtggtacacgcctgtaatcccagctattccggaggctgaggcacgagaatcacttcaatccaggaggcccgatgattaggttcaaggccaaatagcaaaatatgtttgcatttaatctattttctctctatataaacactgcaggtcaagagtatgcacagatatgaagacttagagttttcttctcctccggacctatcatcctttgctccctttctgatctctggaaggaaggtgggccaaaggtggccagcagttgtctacttgtggttaatttattcctgctgccctctgctctttctatggccgccatcttttccatcctccaaactgaagagagatgttgttaggaagaggcccttccttcacactggcagaataaatttattcaggccctttacccacccaacatcagagctgcacttcacgtgtggctcctgagtgcctggaatgtggctgggtctacactgtgatgtgctggaaaggcaaaaaacagacttagtagcctgtgtgcggtggctcacgcctgtaatcccagcactttgggaggccgaggcaggtggatcacttgaggtcgggagttccagaccagcctgaccaacatggagaaaccccgtctctactaaaaatacaaaaattagccgggcatggtggcagatgcctgtaatcccagctactcaggaggccgaggcaggagactcacttgaacccaggaggcagagaacacactttgtgccattgcactccagcctgggcaacaaaagcgaaactccatctcaaaaaaaaataaaaaaaaaaaaacaaaaaaaacaaaaaaaaacagacttagttccaatgatatagttctaactatatacatgctacattaataattacacattgctcatatagtaatattttggatatattgggttactgaaattgttacaatcagtttgacctatttcttctttctttttaaagtttggctactagaaaatttaaaattcacatttggctcacattctatttcagaagattgcctcctttttttttttttttttttgacggagcttagtttcgcttttggtgcccaggctggagttcaaagcgatctcggctcactgcaactcctgcctcccgggttcacctgtctcggcctccccagtagctgggattacaggcacccgccaccatgccccgctaatttttgtatttttagtagagacggagtttcatcgtattggtcaggctggtctccaactcctgacctcaggtgatccgccggcctcggcctcccaaagtgctgggattacaggcgtgagccaccgcacccggccatgattgcctccttcttaaaatctcaggctgcctgatcaaaaaaccagaagccaggaaggtcaggaaagctgaaattttaaaatagttgttattagattatttttgtttgtgaataacaatatagtgtatttttttcttttctttttttttttgagacagagtctcactctgtggcccaggctggagtgcagtggcgcgatctcggcttactgcaatctccgcctcctgggttcaagcgattctcctgcctcagcctccggagtagctgggactacaggcgtgagccaccgcgcccggccatattatgtattatgtataaacgcatatgaccttacacacaaggttaaatgcaaatacctttgggttgggcctggctcagctcagggaggaaaacctgcctgaaaaggctggagcttaggctttcactctttcttcattcagccgagcatctgatcacgtctcctgtcactcagggcctaaaggggcgaggccttaaacgttatccagtcagggacgctgggctggaaaccgtccaatcagacacgaagctggagcggacagggtggcttccgggtttggcgggtactttgtctctcgctctagcccgagctgcaggtctcgtcttccctggtctgtgtcctcttctcctaggggcccagcctctgtggccctgtgacctgcaggtattgggagatccccagctaagacgccaggtcctcctggaagcctagaaatggtgagagtgctgggtccgacatcctgggagaggggaagggggtggttggaacctgtgggaagtcgctgtggcgggactcaggcctccttgcagtcagccctaccatctgcgcccgagttttccttggccagctcggcctcggtccccctcagccataagatggcggctgcgctgacagccgggaccccgggcgtcctgtctcttccctgcgcagtgactgtgccctggcctggatccctctctcggcagctctgcacccgcagcgccgagtctccccaggttgtgcagggaccacaggagagtcgtcaggggagaatcctgactcggggtgcggggttcatgaatgggaagagctttggtctgtggggttctgagtctctcttttctcttattaaaaatatacagaagtcaccgcaaaaatattaaagaatttaattaaagagtgattcaaaaatccgggcgcggtggcacacgcctgtaatcccagcactttgggaggccgaggcaggcggatcacgaggtcaggagattgagaccattctggccaatatggtgaaaccccgcctctactaaaaatacaaaaattagcgggcgtggtggcatgtgcctataatcccagctactcaggaggctgaggcaggagaatcgcttgaaccaggaagtcagaggttgcagtgagccgagatggcgccactgcactccagcctgaagacagagcgagactccgtctcaaaaaaaaaaaaaaaaaaaaaaaaaaaattgtaaagtacccagctatggtttgtcatttgtcgtccatagcaggggcttgaagagaagactttaataacatgagataaagaaaaccaaattcagtaattggttagatgcagttacatagtttgttaatttgtactatcaaggtggacatttccttgttatgtaatcagaggttaaatggtagtgtatagttggctacgcctcaattttgtttcccccaatttagtaatttataaaaacatgcgtttgaggccggcgctgtggctcacgcttgtaatccgagcactttgggaggcccaggcgggcggatcacttgaggtcgggagttcgagaccagccttaccaacatggagaaactccgcctctactaacaatacaaaattagcggggcgtggtagtgcatgcctgtaatcccagctactccggaggctgaggcaggagaatcgcttgaacccaggaggtggaggttgcagtgagccgagattgtgccattgcactccagcctgggcaacaagagtgaaactccatctcaaaaaaaacaaaacaaaacaaaaaccatgcatttgagttaaatttctttaaagtagaaatccagggactagagccacctcagtctagttgcctgccacttaattattttcacaagccacaggggactaattttccgctgatttgtttttctttttttttttttttaagaaggagtttcactctgtcacccaggctggagtgcaggggcgagatttctgctcattgcaacctccgcctcccaggttcaagctattctcctgtctcatcctccggagtagctgggattacaggcacccaccaccacacctggctagttattgtatttttagtagagatgaggtttcatgtgggctaggctggtctcgaactcctaacctcaggtgatccgcctgccttggcctcccaaagtgctgggattacaggagtgagccgcgtccggccttttccgctgaattttttacatgtgtcccaagcagagtctcaagttttaccctcctcccccttcatcatttcttcagcctaactctggattgcaaaaatagtaaataataaaatactaaattttcagtttcttctgacattcccaaatgccagttttccctaattcacattatcaattattcatcctttagtttacattttttataccatattttaatcattttttgacaaagcattggatggcactttaaaaagatttgttttctgtttgtaaatactttccatgggaagaaagcaaagtataattccctgacactgtagtgtaaaaaaaattttgttcctctttgcttttatcttgtataggcacagagatcttatcagaatgtttttgggtcaaagtttccctttggaagctgtgaggtgagatgtcttcacccaccctttagttttgttcttggtcttgggcttcagtatttcctggggataaaccaagatacccaccatggctatatctgctagagtatctagtggatatcagctactgggtcttttttttttttttttttttcttcttatagcacaacctgagttatggagtgtagcctattaagaaagaaggtggctgccccagggctgagaggagtctcctgttgtatttctttttcgaagatattaagattgtcttcacccaactcagcttccatttcttagagacacattgctgttaagccaatcagatgctggtaaaaaacacagaaataatttctgccccctggattctctaagtgggcagagaaatagtgaaataaaaatagtgaaacatttgtgaaagaaaaaatagtattttttggtttctttgagacagagtcttgctctgttgccgaggctggagtgcagtgacaccatcttggctcactgcaacctatgccacctaggttcaaggattctcctgcctcagcctcccaagtagctgggattaaaggtgcccaccccaacgtttggctaatttttgtgtttttagtagatacagggtttcgccatgttggccaggctggtcttgaacacctgacctctggtgatccactcacctcggactcccaaagtgctggaattacaggcgtgagccaccgtgcctggccaaaaaacagtatttcaaaagacaaaaatttaaaaaaagaaaactgaacccagttagatggtataagagcttacaaaataaaatgatcctgggccactcagtggggcatagtgcagtttctcctgagagagtggttattgagcacttatgagagcaggatggggtgggagaatctctcaagcgattagatggccttacttgacatatgagtcagacacatttgtttcttaatcagcattgctactccctcggtttgtcaccttgaaaagaattgttttcggccgggcgcggtggctcacgcctgtaatcccagcactttgggaggccaaggcgggaggatcattaggtcaggagatcgagaccacggtgaaaccccgtctctactaaaaaatacaaaaaaattagccgggcgatgtagcaggcgcctgtagtcccagctactcgggaggctgaggcaggagaatggcgtgaacccgggaggcggagcttgcagtgagccgagatcgcaccactgcactccagcctgggcgacagagcgagactccgtctcaaaaaaaaaaaaaaaaagaaaagaattgttttcacttatcttgacctccgattttttaagtataagttgcattttattagtagggctttaaaggtaagaaaatatttacaaagggacgggggagcactgtctcgtgcctgtaatcttagcactttgggaggccgaggtgggtggatcacctgaactcaggagtttgagactaacctgggcaacacggtgaaactccgtgaaagcccgccactatgctggctaatttttgtatttttagtagagatgggttttcaccatgttgtccaggctggtctggaactcctgacctcaagtaatccgcctgcctcagcatctcaaaggtctgggattacaggcatgagccaccatacctagccctcatttacctatttcttttccagagtgaatttagaaatttttttttttttttttgagacggagtctccctctcacccaggctggagtgcagtggcacaatcttggctcactgcaagctccgcctcccaggttcacacccttctcctgcctcggcctcccgagtagctgggactacaggcacccgctaccatgtccggctaatttttttttgtatttttagtagagacggggtttcaccatgttagccaggatggtctcaatctcctgacctcgtgatccgcccacctcggcctcccaaaatgctgggattacaggtgtaagccaccgcgcccggccgaatttagaaattttttcaagtgtgttttattatggctgggtggtttcaaacgcaattccaaggcttagcttttagaatgctaccaaggaaaagaatagaaaaaaatctctgtattttggctgtagaaaatgaatacatttccacaagaaaatatggtagataattgatgagttacatggattcataaaagcatcagtttctttttttgcagggaaaacttgtgatagtgaatatctctgttctatattctgttattttgatttctgagtttaatgttaaattttatgagattaaacttgttacctcctagaagtgttcacatattactaattatttacaacatgatttttaatgaaactaatacaataatacatttattctctgaaaggaatactttaacttttcttattgggtatgaaatataagcaccttaattttttttccttatatgagtactatgtttgataattttgctagattttttaaacacttagtttcaaaaaccaagtgagtaactctgtcatagaaattaaaacttgagcccagtgactccaagctaaggctaatattgagcctgcaaaaaaggttattaaaggcccagctaattctttctggggagccgcccctgcagatgtcccagccatggaagaagcctttatcctgagagaagctacagagccctggaaagccggggatccacaggcagatgcagttaaggttaaaatagaaggggtctcagaaggtcttactgaagatgaagttgttattgttctgagatagtttctagactttgtaaaatataagcaaagttagatttatgtttaaaaaaaattccacaggagtattgcaacaggaggaagcactaacaataatatctttaaggactgcaaagcttaggctgacagggactgactttcataaggaggagcaaacagattaaaaagaaagtgtgagggaaatgggaaattgaggatgaaataactagatttgagatcttttgagatggagtctcactgtgtcgcccaggctggagtgcaatggtgtgatctcagctcactgcaacctctgcttcctgggttcaagcgattctcctgcctcagcctcctgaatagctgggattacaggcaccagccatcatgtctggctaaattttttgtatttttgtagagacgggggtttcaccatgttggccaggctggtcttgaactcctgacctcaggtgatccacccacctcggcctcccaaagtgctgggattacaggcataagccaccgcgcctagccaaattcagctgatttttatatgagaaaaagaagaaaatgtgcagagtctgtgtctggctatgtgatgggcaaaaaaaagagccccatctaagttataatggaaagggtgtttctttccatgaactgttcctggagcacacaaaggatggagaattttattaatcacaactatttacctggattacctatgtgcttcatctttccccacctattttttttttgtcctatacatttattccattttgctttttctgggttgtatcttttatgattaactggtcaacataactatgttgttttgcttgttagtggctctatcaaatcattgaacttgagggaggttatgggagtccttgatttttaaacagtagctcaggagcatagatgggttcattgggtttgttcctgacatctgcagtaaagagaatactgtggtactgagccctgaatcagggtctgtgctgaatgggtggtgtcagaattcaaattttagacaatgagttgatgttggagaatcttggtattcagcaaactctacagatttggtgccagaagaaagataccacagaggcctggcctgaaatgaaactctgggaggctctgcttttctgtctgtcatagtgcccattgttttgtgattctaggtctcctcccagggtgagagaggactgaaaacttaaaggaaagaagctcggatagcagattccctttttccacagctgtcagcacaggatttctacccagtcacaaagacacccactagacattgaggtgtctacaccactcccagggctagacaccaccctcaggaatttcaccacagcatttttatcctaatgtttttttttgccaaaaacccacaagtgtctacaagtctcctggcatatcctcacccctagacactgaatctgcagcagcaacctgttttctccaccaacctagggttctggaccacctgttcgtaatctcatctgcctgcatgaacccagaaataaattagagtcacacctgggccactatctgtagcacaaaccagtcctatcacctacattgcactctctcaaactaactcatggatttttttccttttaacttttattttttgttcctgagtacacatgcaggtttgttatataggtaaaattgtgtcatgggggtttggtgtgcagattatattgtcactgagatactaaactttgcaccaaacaggtattttttctgatcttttttgtcctcccatcatccaccatcaacttgccctcagtatctattgttctctttgtgtctatgcattcttatcatttagctcttacttataaatggtaacatgtatttatttattattattttttgagactctgggattacatgcgcctgccaccacaccagctaatttttgtatttttggagggacggggtttcaccatgttggccaggctggtctcgaactcctgacctgaggtgatccacccacctcggcctcccaaagtgctgggattactgtctctacattagttttctaagaatactggtctctagctccatccacgttgctacaaaggacatgattttgtttcttttcttttttttttttttttaatggccacgtagtattccatgatgcttatgtaccatattttgtttttattaaatcttttattttattttatttatatttgaagaaagggtcttactctttcacccaggctgaagtggagtggtgtgatctaggttcaatgaagcctcaatctcctgagcttaagcaatcctcctacctcagccccccaagtagctgggactatagtcacatgccaccacacccactaatttttttctttttctattttttgtagacatgaggttttgccatattgctcaggctgctgtcaaactcctgagctctggcaatccaccagctttggcctcccaaagtgttggattagaggcatgagtcaccatacttgcccataccatattttctttatccagtctaccatggataggcatttaggttgattccatgtctttgccattgtgaatagtgctgcaatgaacatgcatgtgcatgtgtcatgatggaataatttatatttctttgggtatgtacccaattaagaggttgctaggtcaaatggaaatttgtttttacttacatgagacatcactacattgcttttcacaatggttgaactaattcacactcccaccagcagtgtataagcattccttttacaaccttatcagcatctgtgattttttttaactttcgtataatatccattcagatttgtgtgagatgatgcctcattgtggtttttgtttgcatttctctaatgattagtgatgagcatttttttatatccttgttaaccacatgtatgtctgttttgaaaagtatctgttgatgtcttttgcctactttttcttttttttttttttttccgagatggagtcttgctctgtcgtcagactggagtgcagtgggatgatctcggctctctgcaacctccgcctcccaggttcaagcaattctcctgcctcagcctcctgagtagctgggattacaggtgcccaccaccacgcccggctaatttttgtatttttagtagagatggagtttcaccatattggccaggctggtctcgaactcctgacctcagccaatctgcccgccttggctttggttgggattataggcgtgagccacagtgcctggcctaatcaatcttgagttgatttttatatatggtgtaagaaaggggtctagtttcagtcttctacatagtgctagctagttattccagcaaaatttattaaataaggaatttttctcaaattcctcttgtcagtttgtcaaagatcagatggttgtaggtgtgcagaataaattttggggctctttaatctgttgttttggtctctgagcctgtttttgtaccagtaccatgctgctttttttactgtagccctgtggtttaaagtttggtaatataaggcctccagctctgttccttttgtgtaggattgccttggctatttgggctcttttttttttgttccatatgaattttaaaatggattcttttggttctgttaagaatgtttttggtagtttgataggaatagtattagatctgtagatttctttgggcagtatgcccattttaatgatattgatcttttctatccatgagcataaaatgattttccatttgtttttcatctctgacttatttaagcaatgtttttttgttttgttttgttttttatttttgtcatagagatctttcacccctctggttagctgtatttctacataattatttttctgtggcagttgtgaatgagattttgtttttgatttggcttttagctcagatattgttgatgtacatgggtgctactggtttttgtacatttattttgtatcctgaaacttttctgcagttgtttgtcagtttaaagagcttttctgtcacgactatagtcttttctagatacagaatcatgttgtctgcacacaaagatcgtttgacaacctctcttcccatttggatgccttttttttttttctcacctgattgctgtggctaggacttccaatctatgttgaataggagtggtgagagaagacattcttgtcttgtgccattttttaaagagaaatgcttccagcttgtgtccattccattcagtatgttggctgtgggtctgtcataaataattcattattttgaagtatgtaccttcaatgcctaattggttgagggcttttaacataaacgatgttaaattttgttgaaagctttttttttttgttgcatctattgagataatcttgcagtttttgtctttcattatgtttatgtaataaatcacattgatttgtttatgatgaaccaatcttacatcccagagataaagcctacttgattatagtggattagctttttgatatgctgttggctgttggatttgattacacagtattttgctgaggattttttttttttttttgagacagagacttgctctgctgcccaggctagagtgcagtggcatggtgttgcctcactgcaacctctgcctcctgggttcaagtgattctcctgactcagcctcctgagtagctaggattgcaggcacccaccactgcgcctgcttttttttttttttttttttgagacggagtctcgctctgttgcccagtctggagtgcagtggcgaattttttttgtatttttcgtagagacggggtttcaccaaattgaccaggctggtcttgaactcttgaccttgtgatctacctgcctcggcctcccaaagtgctgggattacaggtgtgagccactgcgcccagctttgctaaggatttttacatcaatgtttgtgaaggatattggcctgaagttttctttctttctttttttttttttttgagacagagtttcctccttgttgcccaggctggagtacaatggtgcaatctcggcttaccacaacctccacctcctgggttcaagcaattctcctgcctcagcctttcaagtagctgggattacaggcatgcgccaccacacccggataattttgtatttttagtagagatggggtttctccatgttggtcaggctggtcttgaactcccgacctcaggtgagctgcccgccttggcctccaaagagctattacaggtgtgagcctccactcctggccagccactgcacccggcttacctgaagttttctttttccattttatctttgctgggttttagtatcacaatgattctgttctaatataatgagttggggaagattttcttctcattttttttggaatacttttagcggaaatggtactagctctttgttcatcttaaagatttcagctgcaaatttctctggtcctcagaactttttggatggtaggctatatattactaatccaattttggagcttgttatttgtctattcagggcttcgttttcttttgtgtggagtcttggcaggatatatttgtgttcagtcttggcaggatgtatttgtccaggactttatttattactattagatttcttgtttgtgtgcatagagatgtgcatagtagacttcagtagttatttgtatttttgtggggtcagtaataatgtccctttgtcatttctaattgtgtttatttggctcttgtttcttcattaatctagccagtagtatatcttatcaattttttttcaaagatttaactcctggatttcttgatcttttgtatagttttacatgtctaagtctccttcagttcagagctgcttttggttattttttgcattctgctagcttagaattggtttgctcttgcttctcatactttattttgtgatattaggtcactaaattaagatctttctaacatttcgatgtgagcatttagtgttataaatttccttcttaccactgccttagctgtgttgcagcaattctggtatgctgtatctttattctcagttgtttcaaacaacttcttgatttctgtcttaatttcattatttgcccaaaagtcatttaaatgcgggttgtttaattttcatataattgtatgttttcaagtggttttctttgtagttgaattatattttcaacaatctgttgtctccatgtgtggttggtataatgtagggatttttgtatttgctgagtattgttttatttctaattgtgtggtaaatgttagagtttgtttcacatggtgattagaataatgtatattatgttgtttttacatagagttctgtagatatccattaggactatttggtcaagtgtcaagtttacatactgttatctttgtttattttctgtctcaaggatctgtctaatagtttctgtggggtgttgtagtctcctactgttgtgtcagaattaaagtctcttcataggtctctaagaacttgctttattcatgtgtacccatggaatttttataacacatttctctcttctgcttttttccccataagcattatttcaagtgcacaaagtgtgcccaaggttgccccttagatgcctgaatccaatgtctgctgaaattgagatgtccaagaattcaagaacacgtccagaaaacctggctgttgtagaaaaaaatataaattagaaatgaaaagctttattcttctaccttgaaataagcacttagcatcttaaagcatttaagatgatatgtacatttatctttgttattttgaaatatacataaattatattaacagctaagtaaaccttttgtcattattttttactcaaggttgtcattagctaggacttcagattcattgctttgtttttgctttggcaaagttttttcctttcatttttagtcttttaaagtcgacagttttgtttatatcaaagcttattttaaaaacacgcaaaagtggagcacaaaaataggattaaatttagccatacagaatgataaagactaaaagatactgagtagttttttttaacagaaaactgattgtccaaggtgattatctaatattttcaggctgaagtactcacactgcaaaagaaagcagttcagtatataaactgaacagtgaagtctttagttgtactttggtttccgtttattacttcagaacaattagcatagttatgtgtagtgtttgtaggcaacctgcgtttatatactttaaaaactattttcagccaggcatggtggctcacacctgtaattccagcactttgggaggccgaggtgggcagatcacgaggtcaggagttggagaccagcctggccaacatggcgaaaccccgtttctactaaaaatacaaaaattagacgggtgtggtggcacgcgcctatagtcccagctgttccggaggctgaggcaggagaatcgcttgaacccaggaagcagaggttgcggtgagcccagaccacgccattgcactccagcctgggcgaaagaacgagactccgcctcaaaaaaaaaaaaaagtattttctacaatagtatgaatataaggccacaaaatttactttcaatgaatcagatgggccttttaatattgttatttatacttttgaaatataaagtgttttaactgaattatgataacagactttttttgttttgttttgttttttcaatggagtttcactcttgttgcccaggctggagtgcaatggcatgatctcagctcaccacaacctctgcttcccaggttcaagcgattctcctgcctcagcctttcaagtagctgggattacaagcacccaccaccatgcacagtgaatttttgtatttttagtagagatgggatttcaccatgttggtcaggctggtctcgaactcccgacctcaggtgatccacccacctcggccttccaaagtgctgggattacaggcatgaaccatggtgcccagcgattacagacatttttaaaaaattttacatttattatgactagtacattaaaattatatatacttagatatttatatctaatgttcaaaaaatttactacaaaattgttacagtagatattagtctgaaatgcttatttatctaatagggataactctaggtaagcataattttagtgtcttgtatttcactaacttggaatgctgctattacaggacaaacacaggtgacatggccatccaaaaaccgtaatagctctttagttaactatgttgcaagctcaaatatattctactatatgaacagagagggattccaattcttcatcaaaaagtgctggtggaagttgtcagatgtatttcaacatagatcccccattcaatggctaggagatgagagagcaacagagatgaaagagaaaccttatgaaattctgctgaaaatatgcacactttctttataatgctcatgtttctcatgctgagagtagctgtgcactctggatgcttagaaattcttttcaggggaatattttctggctatttcgataaatcttatgtctaatttgagtttttcttaagatgcttttaacttctttatttctctcaataaaatcttgctcatttgagagctgtttttctctcaaatgctttgggtgtctgttttagaagccttatgcgtatcccgtggtgtctttgaatgaggtgggctgtcacagggatgactcttggagtgatctctaccgagactcatactgcaaatccagcagtattttttcatgtcaccattataaattggcactgaggctgaaacacttcttccattccctttattgtgaaggtgcagttctacccaggaggcctgcaggctctcctcctgcagctcaggcttcactctctgatgtggcactggagtgctactgtggcagtttgggttcacataagatgtgagctgccagctgtgagccctgtgctgtgggctgtgcctcagtggcagatggtaggagtcaagagaggacactggtgaccaggggagggcaagcaggagtgctctagcccagtctcagggagtagagagccattattttaaaatgtaaatagccaaaatgatagcatcctaatcaaccatttttgtagaagagtgagagcctaccttcagcaggcaccaggcttaagtggcaaaactgccttttgtcatgaagatgtgataaggtttattttggcattgaatataaccatgtagcatatatggaaggccttttcaattatcaagtgaatttagaatgaattatgtatagcatggtgttgtaaatttttctacttatggactaattatgatgaacatctttctgtctttgcagtctttgagcagattgaccatgatgcacttcacattctaggttaattgtgtaataaaacagttttctttctgttctatcattgtgtttctctggggctgtagaaagtttttcttttcgttatatattccagacactgtctagaattaccagacatgatataaacacataaggtgccagccaagctttactctagaggggactttccctctcaggcttccagtcacctcacaattatgctacatagtatgtgctgtctcctaaatatgcaggaagaattgtgtatctgcctatttggtatctataggccactacagtcacttctagagaagctagaccagatttctacaaacttcacagggcagcaatcaacattttacctctttcgttgactcttgtatcttcagacctgaaactgattcacagaacatggagctcagaaacccaatcagagtaatatgtgcgcactgaatagacacgtagacatgagaatctccactttcttgtatctcctcttgctaaaatgtccacaaatatgcaggtaacacctgctgctactccacccatccagagcctaaatctgcagctccaaattctgaatgtaggtcttaagttttggaaaataaaaaaaaacgtttatctgaggaatacaagtccttttagttgtcaaacacagagagacattaaaatgagagctcaggttgggtgcagtggctcacacctgtaatcccagcactttgggaggctgaggcaggtggatcacgaggtcaggagttcaagaccagcctggccaacatggtgaaaccctgtctctgctaaaaatacaaaaattagctgggcatggtggtgggcgcctgtaatcccagctacttgggatgctgaggcagagaattgcttgaacctgggaggcgaaggttgcagtgacccgagatcgcgccactgcactccagcctgggtgacagagcgagactctatctcaaaaaaaataaaaaataaaaaataaatgagaaacacaattatgtctcccccccgcttgagctatgtattcatctcctgaaaccattcacaattgccacaagtagcatcaatttaactaataatgtgacactgaacactataacttaagctgtaaaccttactgatgtatatccaatcaatagtcaatgttatttctataaataaataagaaaggtaggtatagttgtggttatgactctagacactttgttgccttgatctctcactcccaaaatcgtttgttactaacaaacatttttgtaccatcccactctctgtccctctttttttttttttttttttgcctttacaaatccacttgtaactgctgattatcaaagtgtagattccaggcaacttgaatctttgctcccaggttacagtcctcaaagatggaacaaataaactgtctacttatatctgtgttgcctcgggtttttctttttaggcagacatattacttaggatgtgctagaacagcctctaggagaacatctctctttgattgtactccacttgctgtaacacccaagaatgcagagccagtttgatctgaccaagaatctgcacataagagctgatctctgcctgagattcacaagacagggccaggttttagattaagaaggtaatgaaaaccaacaggaggaatttctgcattgtgagatgtcaacatagacatcttaaagcccccctttgatagtgtggctctttgagcttttcaagtcttgtccagtgacctgctgcagttacatgagaggatcctggtgtaaacagaatctgatagcaacatcttaggagtgagagatcaaggctacaaagtatccagagccatgactgcaactatacctactcctaaaatgtgatactggagtagaacatttttgtccttcctcttacccaaaagctagcaaatcaggacaggtgatccaggttctggagctttaccagggcagttccattttctatttagaatcagcctaaatctcttctgtctggcttacaattgggccgtcagcacacggtcactgggaatcctctcagaatcacctaggtgtctttgagacatttgaggatttccagagcagaattgtcaggctgacgagtggttaactctgcttctgtctcagtgtaagagaaatgggtcatccttccctcattcaagaggtgtctttggttggtacccagatgacagtttcttcaattgctggtacttgggaggaaaagaagtagttctggagattcgaacagttaaactaaatgcttccatctcatatggccattagaataatagatgtagcagtcatggtccctaccatccatgaacttttagtccagactagcaactggataaacgatgaattaagcatcatatggttgatataataaatagatttgtgcaaagaaacttggggtttatttgggccgtaagtaacccaaataaaaaataaacaatattaggccgggcgtggtggcttacgcctgtaatcccagcactttgggaggccgaggtgggtggatcacgaggtcaggagttcgagaccagcctggccaacatggtgaaaccccatctctactaaaaaaaataaaaaattagctgggcgtggtggtgggcgcctgtaatcccagctacttgggaggctgaagcaggagaattgcctgaacccaggaggcggaggttgcagtgagccaagattgagtgattgagtgattgcattccagcctggacatcagggcaagactctgtcttaaaaacaaaaaaacaatattgttgtgacttctgatgtcatcacctgaagggatgtttatggacagaagaattgttattatttttatttcttttattttgctaagaatacttatttatcttctaataaaattattctagatatccttaagatatttgtttaaatggattattagtatatattaggaaattgacagggcagtagctaaaaaagattaaagttacatgaactctgggatttaagtttttcttaggtaagcttaggaaacagaactggaagtaccccagtggcacagagaacaaattctacataggctccactccctgctccagttctgttcagttcctacttgggggctttatttagtcctgtccccaccctggagtcttgcctcagataattgatttaataagatcagagttttggttggtgaagcctgctgtctttctagaagtggtgctcacagttttctgaaatccaaaagcagataaatgggaataataaagtatgtattttagggtctttttaaattttttattaaaaccagtgcttgcagagacattccatttagcaacttgttttctaatcttacaaatcagtagttgctccacaagtcacaaaaaattaaatataaacacaataaaaattcctctaaactacattaaatttttcctttatccctctcatctatctatttagctttattctatacattttataaaaaattaatgacagagaaactataaaaattaaaatgctgtgccctttatctaaatcctgggaattattaaacacttagtaccaattcccaagggtgttatgaagattatgtcacataatgtgttattcccagcacagtgctccgtaacatcctcttgagcacatagagcacaatgtttaataaacattccatcagtacacttgtacatgttatttaaacgcagacttattcagacatggctgttttctgtttcctctgtatactctacagagccagcaaagaatatgatactttaggatggagagtggttgtcttcatttgccctagaagtatttgtgttgtgacaagagtgctgagtataagggactctgtgctgtgcctgctttctctaactaatgctgatcatgagcccaggggagcaacatcaacattgacaggggacttgtttaaaacattcattttggacccttttcaaacctgcagcatcatattacatagagtgggcccaaaattactaagtgatttgtaagctcattaaagcttgagattaaatgcttagctaagtggttataagcccagacctctaattaggattacatggccaatttgcagaaaaatccttacttcagcttttcctacaggttttgtttattgttttaggtggaaacatatatgttgttttggttaagtacctcgtataattccaatgtgaggccagaatcaacaatgaagggttcaaggcattcatgagagttaaggtagaaacctttgcactaaagggtggtcacagggcatgttctgtttgggtttgggagagacaaggcagtgtggcccatattaccattactgtagcagaaattgctggtgtctgtggcagaggagggcatctgaggacagaaaagaagaaacttatatttttattttcatagagaagctcattgttcctgaatctctactagtataaaggacagaaatggatggaatgtttctgcaggtcttggtcctgccagtgggtgtggtggtagcaggtaaatgggtggtgctgacacctttaaaggcatattctcgagatgcaggtgtaatttgtgcagaaaatttcatctgagcaagaattccagaggagaaggaggaaaaaatggcttttttttttcaactaaacatgtctcatatcaagagctgtgtccactctgccttctgaaatgccatgcatttttacgtgcaaacctttacttctctacttgtttttcctccctaatgagtttgttttaactactttaaaaaattcttgtaatagtcaagggtctctgaaaaatatgttttttcccatataccagagccttctacatcatggctccttctatgccacgcagaattttcttcatggatttataatctactgtattaaaaatgttccctttgtgtctgggaaggtgtgaatactcaagattcctattggaagaagaaaggggttcttaaaaaagatggaaaacttgtaatgttgaggttccatctgtgttcttcattaactctatagagagcaggattaaggaagtgtttatttaaggaggatggcatttattacccagaaagtcctgaaaaaaaatgaggaaatacttgctctctagggtgctaaagaaagactacttaaaatcactattaaaaattacagaacatgagagatatctgtgtcttgaacttggtataaaactgatggttctttatggttgaattcggactacgatttacttctgggagaaaatgtcacagtggtgatgctgtgtccttcttttgtgcatcagcacatcataaaaatttgtcctagtgcaagtaacattaatgattcacttggttaaggaggtctacaaatttttttactagaaagctagttatttttcttttcattataaattatttttatgcagcggatgtgcataaaccatcacattttatctggtagctgcccctctttcttaggttttatttgcatatatctgtctttggcaagtaaaaactgtcatctttttctttttacagtccagcaatactaggaaaaacacaggctcttttacttagtggatgtttgacaaaatattcttcttgggccaaaaacattggcattactggtgaacttgttagaaatatagaaactcaaaacaaaacaaaaaaaattcagaaacagactttctataagtcagaaccagttctctactctctcatttgaccttgagacattaaaaattctgccctggctgcttggtaaatgtgtatgggggtgtgttttttagagtcagagaatacattagagaatatttctgtgttaaaaaaatattttcttggataattttggtcactccaataaggcagaacctgttctctctgctctttaattacaccttgagtgacattaaaaattctgtccctgaccacttggtaaatatatgtgtgtctgtgtttgtgtgtttttcagggaccactgacaattagggatgtgactgtagaattctctctggaggagtggcattgcctggacactgcacagcagaatttatatagggatgtgatgttagagaactacagaaacctggtcttcctgggtgaggataacttcagtactcaattcctaatatactccaaaggctttattttttatttatttttttttttgtagaatgttttttggtaatttggtaatttttgataattatgttttgcataaatgagtttcatatccctgttttcaagaaaatcataaggatttgtcagtgtagaaaaaaaaatttcttcaagaggtttcaccttgaactgaactttccacattgctgagctgatctgtatccctcactctagaatagtggtaattccagaaatttagtggtgtaaaatattgttgcccacaccttaaaatctaattgctaccaccaatttttttattcagtagtactgggtagtgaattaagaatctacaaatatacagtattttctaaatatttagaaatttctgttataaattagtattttggcataaatgtattagaatattatattacattctctttattgagcacattactaagttggtaattggagaatatgagcaagatgcgtgttacttatttttaaaaaacaggtattgctgtctctaagccagacctgatcacctgtctggagcaaggaaaagagccctgtaatatgaagagacatgagatggtagccaaacccccaggtaggtgagagtgaaagccagtacaacaggtgaaacagatgagagatccacaggtcaaggagaaagcaagtccttaaaatgtcatttcggaagctgtattccaagggatatagtttctggaagcctgagtttgcattttttttttctttgctctcacatagggacatttctgtcttatgcttttaaattctctaaagattctactttcctttcagtcattttccttcaagtttacagtgagagccaaagtcctcatggcatataagagactgcatagtctgactgctttttcattgtttttaggggcatacaaatatctgcataattttcaaaaattctatgttaagctatttcttaagttctctttttgcattgtgcctgacatgaatagagtagtggtttctgttccattgaattttttaatttttctgcacatttcatcctttttctttagtatatttttgaaagatagtttggaattataaaatatgatgtcattctgctttttttttcctgaagattgctttggctattcaaagcttattgtagtttcatgtaatctttagccttgtattttccgttactgtgaaaaaaacttgccactggaatttttacagggagcttattgaacctatatttattgaatctatattctttcaactcatagacatgaaacattttcaaatttatttttgtcttctctatttcttttcctagctatcttatatctttcagtgtaaagagtttttatctccttggtcaaatttgttctcagaaatttatttatttatttatttattttttgagatggaggttcactcttcttgcccagactgaagtgcaatggtgcagtctcagctcaccgtaaactcctcctcccgggttcaagcgattctcttgcctcagcctttcaagtagcagggattacaggcactcgccaccatgcctggctaatttttgtatttttagtagacatggggtttcaccatgttggccaggctggtctcgaactcctgacctcagatgatccgcccttgtcagccccccaaagtgttgggtttacaggcgtgagcaccgcgcccggccagaaatttattattttaatgctattgtaaataagatttttttttgtctattttaccagatagtttgttttaagtgtatggaaccataacttgtattttaattttatattttgctaatttacggagtttatttattaacttaggttttaatgcgctgcttatggttttctataaaaaagatgtaatctacaaacagcaaatttttacttatttgtcttcagtttcaatggctttttgaaaactgttttgactaattattctgccatatacttcagtgctatgttaaaatagaagcattgacaaggtgcacaatataattttgcatttggtgtctgtgaatttgaaggagcaaacacctcttcaagtttctataaactagtttcaggaggtaaagatcttcttccattgggcccccagggtgatgggattccctctgggtttgtgatggagaggggttgtagcttggtcacaagattgctgggtctgcactagggtccacctttagttggcttgttacaaagggcttggatagttgtaattcccatattatttttggacagattggatatccttcaagactttgctctgtagggcagacactagggcaggtttttgcagtagggtctgtatataatgtaccttaaatcgggatgtaaatgagtatggcttttgctgagtaccacagaggatttcctcgggtcacactgtgttggtttctaggtaaagagaactggccataaactgtggcccaggaagctggaactgagactttgaactgcttcaggcaccacattaaaagccagggtctgcaggcctgcctgcatggctgtaaacgggtgtcttcctccaggcctgtgaaaggacagaacctctcccagactgcggctgaaaggattttgaaataattacagagtaaattcagaattctcagtgggaccaagtagcgttggccatttcctgtcctgtagccaagaccaggggtcctgtagtttgccaccaaaatgagagcctgctttctgaagagaacacccctcaatctttggctttagcagaatttcacaacttcatccctggactttaaagatctcttaaaggcatttattttggagatggggtcttgctacataacccaggctggtcttgaaatcttggcctgaagcaattctccaaccttaatataccatgtagctgtcattacaggtttgagccatgaggcctggtactctcataaaggtatttttgtcagggatggccaacaaattttcttgctgtggaggaatagacaaatagggcaccttttatttctctatcttattaatgtcaccctttctataagtttttaatttctaatttctatttcaaatgtgcctgtaattttagattcagacatttaggagcaataagctagaatttacatgttatgtttgaagtaaattaggtaattagtaggcattccatatttactaatatagttacttacaaatttaagtttgctacaggcaaaaaggaattatatattttcacccattttctctagcctatatctaaacaataacataatttattcattaagtatttgttttatataatagactccaaccatattctgctatatatatattaaattatatatacaaaataaataataaatacatatattaattacatatatattttagcaatgtaaggctatttcttgcttctaaagttggattacagcagtttcattttgtgaaagaatagcatacaattaaaacataaaaattatctctagtttattttaaatgcttatttattgtttctcattaaaatcttctgtttatgattattctgcattatctctaaaattttactgccacacagtgcctgtcaatgattcgaaatacctgccttccatgagtacacagttacagtcaaatactgtagttatctagacaattttttttaatggtacatcagtgttgcataccacattatatgagtaaacattttacttattgttgttttgcagttccatattagtgtgtttttttcaatgtaggtttcttttgttttttgagacggagtctcgctctgtcacccaggctggagtgcagtggcatgatttcagctcactgcaacctccgcctcccgggttcacgccattctcctgcctcagcctcccgagtagctgggactacaggcgcccgccaccatgcccggctaatttttggtatttttagtagagtcagggtttcaccgtgttagccaggatggtctcgatcacctgacctcatgatccgcctgccttggcctcccaatatgctgggattataggtatgagccaccgcacctgtcctaaaatttaccatctttaatctgtttaagtgtacatttcaggcctaggcatggtggtggctcacatctataataccaggattttgggagaccaagacagaaggattgcttgagcccaaaatgttgagaccagcctgggcagcatataaagtccccctctctccacacacaaaaaatgttttaatagccaggcatgggggtatgcacctgtggtcctagctatttgggagattgagtggggaggattacttgagcctgggagtttgaggctgcagtgagccatagttgtgccactgcaatccagcttgggtgacagagtaagatcctgtttcaaaaaaatggtatacatttcaggcatgttaagtacattcacattgttatacaagagacttccagaaattttccatcttgtaaaactaaaactcaatacccattaaataacaacaacccattttaccctctctccagccctcaacaaacaccgtttctctttgtgtttttatgagtgtgatgacttaaaatatctcatattagtggaattatatagtattcattattttgttactggcttatttcaggtgacataatattctcagtttatcttcaaatgtgacaagattttatgaggctgaataatatttcattgtatttaggtattacatttttcaatgtgtttccaaattaagacatttgggttgcttcagccttttgacttttgtgaatactaatacaataaacatgactgttcaaatacgtcttccaggtcctgtgttgcatattatagatatagattcataaatgagattgctgtattttatggtaattttatttttgattatttgaggtacatttataacattttaaaataatggctacgctcctgattttcaccaacaatcgacatgggtttcattttcactgcatcatcaacagatttggtgtttttttaaaaaattatagtggccattctaggccaggcacggtggctcatgcttgtaatcctagcactttgggaggccaaggtgggcggatcacaagggcaggagtttgagaccggactggccaatatggtgaaaccccgtctctactaaaaaaaaaaaaattagctgggcgtggtggcgggcgcctgtagtcccagctactcaggaggctgaagcaggagaattgcttgtacccgggaaatgaaggttgcagtgaactgagatctcgccactgcactccagcctgggcaacagagggagactccaactaaaaaaaaaaaaaaaaaaaaaattatagtggccattccaatgagtgtgaggtgattttgttttttgtgatttttatgcaattctctacaaaatagttattttgcattttcttttaaatgcattttcttatttgtgtatatttttgataagaattttgttcaattatttgaccatttctaaatcaacttattcaactgtattgtttagttttaagacttgtttatatattctgaatattaactcctatcatgtgatttgcaaatattttcacacattttttatgaggcattgtcactctattgaatattttatttgagtgcaaaaattttgaaggatagtgcagttaaatttttctgttattttctttgttgctgatgcatttaatgttgtatctaaaaaagtgttgctaagacaagcgtcatgtttttcttctatatttctaaaaaattggttaattattttttatgtctgggtattttatttaaaatatttttcatatatggttcaaggaaataatccagctttatcactgttgacacccagttttctttctttctttttttttttttttttgagacggagttttgctcttgttgcccaggctggagtgcaatggtgcaatctctgctcactgcagcctccacctcccgggttcaagtgattctcctgcctcagcctctctagtagctgggattacaggcatgtgccaccacgccctgctaattttgtatttttagtagagacggggtttctccatgttggtcaggctggtctcaaactcctgacctcaggtgatctacctgccttggcctcccaaaatgctgggattacaggcgtgagccaccaccgcacctggctggtatccagttttcaacattaatttttgaagagattatcttttctctattgtgtgctcatggcaactttgtggaagatcatttgatcttttaaaggggggttcatttcttcactcgtattctgttctttcatctgtttatgtgtctttgtttcagtaccacatcgtttttattttagcttctagtatgttttgaaattagaaagtataatgcctccttgttctttttcatgggtttctggctatagttgtaatcaaggtttaaacttttacacaagatttcttgtattggttggtctgttctcatgctactaataagaacatacccaagactgggtaatttataaagaaagaggtttaattggcacacacttccacatggctggggaggcttcacaatcatggcacaaggcaaaggaggagcaagtcatgtcttacatggtggaagacaagagggcgttagcaaaggaactcccctctataaacccatcagatctcctggaacttattcactatcacaagaacagcacaggaaagacccactttcatgatttaattacctctccctgtctctctcatgacacatgggaattgtgggagctacaattcaagatgagatttgggtggggacacagccaaaccatattatttctgttaaaaactgtgctattgagattgttataatgattgtattaaatttgttcacaactgtaggttgtattgacacctttgaaaaattaaatttttggcccctgagcaagaatatgttgaagaattttatatatttagttttatatacttttggacttgccagttttgcttttaattcctagttttattcaattgtggtcagaaaacgcacagtgtataattttggtatacttaaatgtatttattgttgtttttagacaggatcttactctgtcacctaggctggagtgcagtggcatgattttggctcactgtcacctcaacctcctgggctcaagtgatcctttcacctcagcatccctagtagctgggactatagacatgcattaccacgtctggctaatttttttattatttgtaggaacagggtctcactatgttgcccagcctggtctcaaacttctggccccaagagagcctctcactttgttcttccaaagtgttggggttataggcatgaggacttcatgctgccatgtaattctcaatgttgaatgtaagaccagtgggaggtgtttggtttgtgaggaaaaattccttgtgcatgggttggcaccatcctctttgtaatcaaaattttacattctattaattcaaaagagagctggctcattaaaagaacctggctccttcaccttacacttgctgtctgttaccatgtggtatgtccagttaccagttactcttggccttccaccatgattgtaagctttttgagaccctcaccagaagcagatgttggcacacacttcttgtacagtctgccgaactgtgagccaaatctttttttttttaaataaattatctactatcaggcttcctgtgtattcaaaataatttatacagtctataatgttttctaagttctctgttttattattgctattttatctgaattttctatttattattgaaaatgaggtcttgatgtctacaactatgttgctatgtatttcctgcttcaatttgttgatatttgctttatatattttggagccctgatattatatatacatatacatatagctagataagtattttattaaatacattaattatattatatatctatatagttggttttttttttttgagatagagtcttgctttgttgcccaggctggagtgcagtggcacgatctcagctcactgcaacctccatctcccaggttcaaacaattcttccacctcagcctcccgagttgctgggactacaaggcacgtgccaccatgctcggctaatttttgtatttttagtagagtcggggtttcaccatgttaaccagcattgtctcgaactcctgacctcgtcatccacctgcctcggcctcccaaagttctgggattaaaggcatgagccaccatgcccggtcctatatagatatctatatgtatacatatatatgttatatatacacgtatctgtaggtatacgtatatatatactcatatacatatggatagataccagttaaattgacccattttaccattatataatatcagtctttgtctcatgctagtacttaggactaccataattatgtctaccataattatgcctacccacccaattataattactatttgcatggaatatagatttttttcattctgttactttcagcctatttaactaaattctaaaatgaatctcttgtatgcagcatattgtatgctgtttttcttaagccaattaggcatttaattttttaaatataatttatttaattttttatttttgagatagattctcactctgtcagccaggctggtttgcagtggtttaatgatggctcacagcagcttcagcctcccaaactcagatgatcctctcatttcagcctctcaagcagctgggttacaagtatgtggcatcacaccctgctagtttttttgtattttttgtagagacacagttttgccgtgttgcccactctggttttgaccttctgagatcaagtgatcagcccaccttggcctcccaaagtcctgggattacatttttaaaaattaaatagtttaattaatttgtatttaaaataattgcttgaagaaatgtttctattaccagttttattgttattgttttatgtgctcttatagatatgttttttctcatttcctattttaccaccttaaattttgcttaattttatagtgacatgccttacttttctatttgtttagcatactttctataaatattatcttcataatcatcttgaaaaatgaagattacataaaacatcttaaggttaaaacaatatattttaatctcataacttcaactgaatacaaatactatacctctacatttttgttattaatattacaaattatatctaataacagatttatgcagatttatattttgtttttcatattctgtagaagaaatttagggattttatgcaccatcattataatagtaaaggattccatgtgtgtctgtatatttacatttaatagagaggtttatatttacatagtcatatgatgctgtgcgaattttatttttcagcataatggactcgtagcatttctttgtttttatatgcaaagtcaccatgttcctcaggatgttcttgaactcctggtcccaagtgatgtgactgcctgggcctcctaaaactgtaagattacaggcatgagccactgtgcctcgccaccatgtagcattttttataggacagtgctagtcgtgatgaacactctcaccttttattttggaaagtgtttatttttatctttttttgaagtaacataatttcaaatcaagtattattggtcaggtatgattttattacctcaaaatttgggaagtacttagtctttttcattttcaagtaaactctgtattactttttccctatagtcttcttccagcattttgttcatgaatatattgatcgacttgatgctgtccaataagtattacattctatgttttaaatttgttttgcaattttatatttttgtattatatattttagaacatgacatctcataccagttaattgtgttttgatttttcagtttatattataattgtgtatgacaatatttagttctgaacaatttaagacagtgtggagcaaaatcaaatatgaatcagccatacagctagtgccaatataattgtctctgtgtttgtttgcctttataaatattatccctgtgtttctttataacttgtatatttgtggtgtaggtttgttgtgaaaggttgtttaatcctgtgtagatgagtagccacaaaaattctcctaatttcaacatcctatttatttgtgaatcttccatatccggtttattcatgaatctatattatttttctgtgaaagaaatacttttggctttgaagataatttaaaaactaccgacagggtgtggtggctcacacctgtaatcccagcagtttgggagggcgacgtgggtggataaccttaggtcagcagtttgagaccagcctggccaaagtggtgaaaccccgtctctactgaaaatacaaaaaaattagccaggcatggtggtgggcgcctgtaatccagctactcaggaagccgagacaggagaattgcttgaacccaggaggtggagattgcagtgagccaagatcgcgccattgcactccagctgggtgacgagtgaaactccatctcgaaaaactaaactcataactaaatttctcttctagctactattgttcatttttacttgtcaaaaacacataataatttataataaaatattttcaaatattctggtttattttttagttatattgacattgttatgcaacataattgctgaagtgtttttatcttgcaaagctaaatctcaatacacattatacaactaccaatttttccagtattatggcacttttgaaacaccactctgttttctcttcctagtggtgtaacttctttatatatctcatacaatctctgtctgtttgtggctggcttatgtcactttgcaaaatatcatcaagatttatctgtgtagttgttagaatattttctgctttttgaaaactgagtgatgtggtccggtgtggtagctcacgcctgtaatcccagcactttgggagaccaaggtgggtggatcacctgaggtcaggagttctagaccagcctggccaacatggtgaaaccccgtctcaactaaaaatacagaaattagctgggtatggtggcaggtgccggtaatcctagctattcggggggccaaggcaggagagttgcttgaacccgggaagcagaggttgcagtgagctgagatcgcgccatcgcactccagcctgggggacaagagcaagacttcatctcaaaaaaaaaaaaaagaaaactgagtgatgttccagtatttttacatttcaaattatatctattgaataatttggtgacagaaattagcattgtttttaactattggctttccgtaacaatgctacaattattatgggtatgtaaatgactctttatatgaccatatatatgaaagtttacgtgttgcattctatttgatttgtctagttttcagcttgatactgataccaaattgttttaattctgtagctttgtaatctgttttgaaataaggaattataatgcctccaacattgtttctttttttttttgaagattgttgggtactttgttgtctcttgcaatagcactcctgagtttgttattgctattttttcaaaagtgcaatgagaaatttgaaaaacattgcattaaatctgtagattacattaaacagtataaacatctatacaatattaattattttaacttttgaaaaagagcatgcttgagtgtatcgtttaatttctatatatttgtgaaattttcagttttttccattgtttcatattcttattccattttgttcatagaaagtaatctataaaattttagggtttttttttttttttgagacaatctcactctgttgcccaggctagggtgcagtggagtgatctcggctaactaactcctgcctcccgggttcaagtgattctcgtgctttagcctgctgagtatctgagattataggcgcatgccaccaggcccagttaattttttatttttggtagagacagggtttcactatgttggccaggctggtttcaaactcctgacctcaggtgatccacccgctttggcctcccaaactgctgggattacaggcatgagtcaccgtgcctggccaaagttttagtttttttttttgttgttgttgtttgtttgttttgagacagagtcctgctctgttgccaggctggagttcagtggcgcgatttctgctcactgcaacctccgcctcctgggtccaagcgattctcctgcctcagcctcccaagtagctgggatcacaggcatgcaccaccacacctggctaattttgtattttcagtagagaccaccacacctggctaattttgtattttcatgttggccaggctggtcttgaactcctgacctcaggtgatccacctgccgtggcctcccaaagtgctgagattacaggtgtgagccacgatgcctggctcaaaattttagttttaaaacacttgttaagatttattttttgacctaaccggtggtctatcaaaaagattgtatgagctattgcaacgggtgtgtttcctgatgttgagaagttttctctatatctgtgttagaaatacttgttttatactgccttcaagtccactgtttccttattaatattctcttgttttattattatcagagaaagtgaggtattgaaatatcctactataattatattgctttctatgtgtttattcaattatgtcagtatttaccttacatatttggaaccctaatgtgagatacacacacacatgcacacacacacacacacacaaacacgcaaacatgagtatatacaaatttttcataggttccccatcaatctattattgcttaatgtcctttgtctttttgagttttgacttcatatacattttatataatatgagtttttgacttaagatatagcttgcgtaatactattttgaccttttctgctctcatttggttaatatttggataaaatgcctacagcaatcttgccactttcaggcttttttaattattagttctaaactgactgttatagaaaggcaagtctggccttgagttttaatgttttttaatgaatccctttatttgaaactagaaagctaattatacctatatgtaagtaattttctaaaagacaaagacttccgttattttattaattattttatttgattcttgtatctttgtccctcattttctccctttctgtcttccattgtgtctgtttcattttagtattgatgtggtttcgcttctttcttattttcttttgggtgtctatacagatattttctttgtggtaccttagggattacataaaacctctaaaagataaagcagtatatatttaatctggtgaaaaatgaacttcagttatatacaaaaatttttcctcattacatctgccctcgactttgttattgatattgctgattatatgttgtatatttattaacagatattcacaataatttctgttcttttatttttctaattttagagcataattataaatgttttctgtcccattatgagaatgataaggaattctatttttgtgtatgtatgtttcccaggaacatgtatttttatatgattatgtgttgatttcttgcatcgtgttattttcagtggaagaaacttttttcagcatctttgatctatataggccatatgcagtgccaatatactgtctcgggatttggttattttagaaggtcttttttttttatttatttggtaggatgtttttgctgatgattattcttttcacctgacagcattttttcttcaggactttgacaatatcacacagttttcttctggcctgcaaaattttcttttgaaaaactcactgtttagtgtgtaactctatgccaataaatgacacatcacttttgtcttgcagttcttgagattgtctcgtctgtgacattttaagttgttcttatatatgtgtttttttaaataaatatcttgtatgtgtatttttgttttttgaacttctttatttttatatcatttttcttttagaattggttaattatctctttgtattatttacctccacaattactgtttttaaaatgcttttaatatttttgccgtttttcttatttttctgattttcagtagttgtctgtgctccttttactcattattattcaacttattttaaatttctaaaatttatacatttttattttataatgattgctttctgaaaatttcatgatttgtttgatggggccatgttgccctaatattttgtacacattgtaatctttgagactgggacatttaaaaaaaaaaaggctacctgtcacaatctttacaatgtagctttatcccggcatagtctaaaaccagttgtcatggctagacattctgggagcctttcaaacatgttcttagagtgtgtctgatctgaaatgttttattttctagtttaaaaagtttatttgcacttcttcctagttatcaatcacttgctacacttgttacctgtctgtggtactgcagtctgtctgctgctgtaacatttacctttggtctcagcagtctcaaattgtcattctaaagtatactattttttttcagcattttatttaatgggagaatgaaaccagtgtcttgaaagacccctaaaagccagacatagaaatgtatgtgccaatatttttcttgtcttttaaatagaaacaaggagttggcaatttacttctaagggcactatgttatactgaggagaaggaagtactgtgttgggttaatataacagatttttctttttcttctatgttgctttttacatcgtgttaacctggggcactttacacacttaactcatttataaattttccaaaaatgtgttttggtcagtatgtttttgttacattttatatgtttttgaataaattagagcctgtggtattttgctatgccatcttccttatgtagtatatacagttttataggttagatttgtaaaaaatatttacctgagtctagtaagtggagtaatttgttgtttttatttcttttagttatgtgttctcatattgctgaagacctttgcccagagcgagacataaaatattttttccaaaaagtcatactgaggagatatgataaatgtgaacatgagaatttacaattaagaaagggctgtaaaagtgtggatgagtgtaaggtgtgcaaaggaggttataatggacttaaccaatgtctgataactacccagagcaaaatgtatcaatgtgataaatatgtaaaagtcttctataagttttcaaattcagatagacataagataagacatactgaaaagaaaacttgcaaatgtaaagaatgtggcaaatcattttgcatgctttcacaactaactcgacataagagaattcatattagagagaattcccacaaatgtgaagaatgtggcaaagcctttaaccagtcctcagctcttactcgacataagatgactcatactggagagaaaccctacaaatgtgaagagtgtggaaaagcttttaaccggtcttcacaccttactcaacataaggtaattcatactagagagaaaccctacaaatgtgaagagtgtggcaaagcctttaaccggtcttcacacattactcaacataagagaattcataatagagagaagcccttcaaatatgatgaatgttgcaaagcctttaagtggtcctcagctcttactacccttactcaacataagagaattcatactggagagaaaccctacaaatgtgaagagtgtggcaaagcctttaaccagtcctcagcccttactcgacataagatgattcatactggagagaaacccttccaatgtgaagagtgtggcaaagcttttaaccggtcttcacaccttactcaacataagataattcatactaaagagaaaccctacaaatgtgaagagtgtggaaaagcctttaaccggtcttcacaccttactaaacataagagaattcatactagagagaaggcctacaaatgtgatgaatattgcaaagcttttaactggtcctcagctcttactacccttactcagcataagataattcatactggagagaaaccctacaaatgtgaagagtgtggcaaagcctttaaccggtcttcataccttattcgacataagataattcatactggagagaaaccctacaaatgtgaagagtgtggcaaagcctttaaccagtcttcacaccttactcaacataaaataattcatactggggagaagccctacaaatgtgaagaatgtggcaaagcctttaaccggtcttcacacctttctcaacataagataattcatactggagagaaaccctacaaatgtgaagaatgtggcaagccttttaatcgtttctcataccttaccgtacataagagaattcatgctggagagaaccccaacaaatatgaagaatgtggcaaagcttgtaaccattcctcaaaccttactaaacataattcataatggagaaaaaccctacaaatgtgaagaatgtgtcaaagcttttaactgttcctcaatccttactaaacataagggaattcataatagagaaaccctacaaatgtgaagaacgtggcctggcttttaacaaatcctcaacatttactaagcataaaataattcatgctggagagaaactcttgaaatgtgatgaatgtggcatagcctcttcccagttctcaactcttactaaacatgagaacacatgtggaagataaagcctacaaatatgaagaatgtgacaaggcctttaaaagttctcaacccttattacacataatttatactggacagaaatcctaaagtgtgaagaatgtcacaaagcccttaataagtcctcaattcttaacagatataagatgtttcatactggagcgaaactacaatcctgaatgatgtcacagtgcttttaacaatacctcaaacttttctaaacataaaaaaaaattatactagtgcgaaactctagaaatataaagaacatgaaaaacttttaaatggttttcacacttgattgcaggtaaaataatttataccggagaaaactccaagtgtgaagaatataacttttaaccagtgttcacaacttattgtacaggaaagcatttatagttgagaaatggtgtacaaatataaagaatgtggaaaagtcattaatatttgctcacatattacacatcagagagttcatacttaataaaagtattataaatacaattactgtcaaatgatctttcagaaatataaacctttaaagtgaagaagagttcattctaaagacaaacattacaaatataaaggggtttgtagtgcttttacttgtatcacagattttattgtacacattttgtactagagaataaccctgaagcagttgctaaaattttgttcagcattaggaaatttatgttggagaagaattcagcaagtgtgattaatttggaaaaacattttttccataactatagcttagaaaatgccagagagctcatactaaaatatacttttgcagatgcaataaatacaaagaaatatttaattcaaattgagtttatataattatcagagaattaacagtagaaatagctaaggcactgacacttcagacattacactaaatcagattgctgagtatagaaaatccaaaactacagttggtaagtaaattaattttatgtaactttaaaatgagtagacatttctttgagaagtcataattaaattcaagtatacttttttgataaaattataaagctttttaaaagtaaataatgatgtaagtcaactctcaaattacttcatgctgtttcttcatttctattgtattcacctgtgaaagcatgtgatcaactattgctgcatcagagatatgagagatactttattaggtgggaattatatacgacctcttctataaaatagtaaggacactgaaatataagatgcataagagtctaagtgaagaggttctttgtggttaacttagtgatgtatgaagtagttgctcatgttatgagagaaaaacatttttaattttagttaaatgtaagttaaaattaaaatagtaccatataatgttagtgattgtacttttatttaataaaatgcagtacattttaaaatttttagattatttgtggacttaatttataattaaatattttcttttaccacgttaagactattgtacgttcaggccgggcacagtagctcacgcctgtaatcccaacactttgggaggctgaggcgggcggatcaattgaggccaggagtttgaaaccagcctggccaacatggtgaaaccctgtctctactgaaaatacaaaaaattagccaggcatggtggtgggtgcctgaaatcccagctatttgggagattgaggcaagagaatcacgtgtacccaggaggcagaggttgcagtgagccaagatcacgacattgcactccagcctaggcaacaagagcaagacttcgtctcaaaaaaaaaaaaaaaaaaaagacttgtgcattcagtggagtattattattccactaactttaacataccccaccttactcaagggtgtaggtaaaatatggtaacaatatgctatttggcaacatagtggaataacacctctagtaatctcttctgccaatggcttcaaattgcaaataagttaaaaaatatttttcccataggttacatttttatcctttttttcttaaatttattctttttaattttgtggttacacagtatgtgtatatatttatgccatatatggcatattttggtacaggcatataatatataatagttacatcaggataaatgaggcatccatcacctctagcatttatcctttttattacaaacaatttgattagtaaaataaaaatattgttattttaaaatattaaaagtactttattttaaaatttgcaattgttctgactacagggtcatttttatggtcataataaaatttatatagaagtataaataaaattgatacatttctaagtactgaataaatatttaaagaatttgttacatatttttctttgaacatgatttatctctgcctgcaaacacatataggcttttagttttgatttacatagagttaaacatatacatatattactctaaagataaaccttaggtgtaagaaaattatgaagtaagtgtgtatgagtatgagtttgtacccatttttggaaggagaaagcaatattggaacaaaacaaattattttaataaggtgacttattagaaaactaaaaacctcgaaaatgttgaaagcaaatctatactctgtgcattgtattgaattcattgctataaaatgttagggcttatagttcagaatctccctatgcacattctctgtttttacttgtctggtactcatgctagacccataatgttcttgttttgtattttatgaagtactcattatgtgagctggtcagggattataagaatgatttttatgaaatttaagagtgcacacaaaataatttttagatgtaattacaaaattagttatatttttatataagttagtttttatataatagttatattgttatattttaacgtttgatttttgttttattggagaaacctgtataaggctaattttctttattgtttctttcactttttataattgacataagtaaatctattgagtgagctaatttgctttggtaagtactagggagacttcataagtcatgaggatgtttttacatataaatgtagcaaacaaatatgacagttcttctgagtaaaacatgctttataataagtcataaatatttttgctggagttagtttgtaacttcaagtcagagatggaaaatagcaatggtgaagaaataacattgattcatcatgtggagaggacattttcaggctgcaaagctgacttgctgaatttaaacacaaattctgctgcttttattttctactgatcttcagttttgtcttacttagtgtattccaactatatatgcatcacagtctttcttcttttactgtgttatgactacagttttctcattgttgtcttcatgccatgtcattttacatggtagtttgtgggttctcatgagaaagttggtatttttaatgcattgaaaaattggttttaactgaagaatttgcttatcaataaaactttcagattagtcaattaagagaatagacatacactgttaacaagtgaaaagattacatcagttagctttttctttgtaaaaaaaaaaagttttattcttgcaaaaagcatggcaaatataaaatttgtaaaaatatttcagaaattagattctaaatagagttaatggtaaatgaacaattttaaatttaattttctatgatatatttatagcacaacttatgtttctatgcagaatctttttttttttctttttttgagacagagtttcactctctctcccaggctggagtgaagtggcccaatgtcggctcactgtgacctccatcccccagattccagcgattctcctacctcagcctcccaagtagctggaattacaccacgcccagctaatttttgtatttttagtagatatggggtttcgccatgttggccaggttagtctcaaactcctgacctcaggtgatccacccgcctcggcctcccaaagtgctgagattataggcgtgagccactgtgactggcagaatcttatatttttaagtgtgaatgttgaatgtggcaaaacagtacaatgacctgtggatctgaaatttggaataatatttattttacatcttgataaaacaatttggagaaattccactcttttttttttttttgagatggagtctcgttccgtcacccaggctggagtgcactggcatgatatcaactcactgccacctcctcctcccaggttcaagcgattctcctgcttcagcctcctgagtagttgggattacaggtgcacaccaccatgcccggctaacttttgtatttttagtagagacggggtttcaccatgttggtcaggctggtctcaaactccggaccttgagatccgcctcggcctcccaaagtactgggattacaggcatgagccactgcgctcagcccatattcttttatatgacttttttttagtaggtacagtttagtctacagatttttactcacctaactgtagccaactccttgatcattggtaagtgactgattagtaattccaaactattgaccggatgcagtggctcatacctgtaatcttagcactttgggaggccaaggcaggtggattgcctgaggccaggagttcgagactagcctggccaacatggtgaaaccctgtctctactgaaaatacaaaaattagctgggcatggtggcgagcgcctgtaatcccagctactcgggaggctgaggcaggagaatcacttgcacctgggaggtggaggttgcagtgagccaagatcgcgccactgcactccagcctgggcaacaagactgaaactccatctcaaaaaaaaaataagtaaatacaattttttaaaaataaaaaaagtaattccagactattttagtcactgtaaaaacttaatattctttaattattaaataggaaaaagtattctgatattagtgtttctgaaactttcagaaagtgtaaaccagtaaaaaaatgatcaggtatatgcagaccataagttttctatttaatcataggctcattctagcttttaatataaaaatttgataaaaggtaaaatgagtggttcttttaaataataagagaaatatcattgttagtagccatttaccaatgtatttttgttaggcttagtaatgagtactttaaaccaaaaatccagttctacatactatctaaaggtataaatagtgatttttaaattccttttagattctactaaagtagaaaattcaaagccaaaatgttacgttggaaatggaaaaaagcattaggcgagagggtgttgggcttaatgattaagattgatacttagtatgaggtggttcctgtttgcatcctagttctgccacttatgagctgtatgacctgaatacagtttgttaacctccgtgtgcttaacccttaagctgtacagtgaggataatagtgcttaaatcttaggatattagtaaaatcagagcaattaatactgataaaggtaccagaagagttcccagcacatcgtgagtgtacaggaaatttatcagctcttgttgattctgttagctcgtgatcaatgttgagcctaaaaagaacgtggccgaatcagtggtttgtaacccatgtttattctaatcagtcagtccggggctataatggtagttggatgtttttaatactatctttggcaaattcccatatattcacatacagcatagttacaaatatctgtggaaagatttcttgttgagtactgctccttagcactccagtaacactagataaataagcacttaaatgcctagtgtttgtcagtgttaaaattaaagaggcaaattgtttcttcatctgcttgtttaataaatttcttattgccaagtatttatgttcatttgttaaacttaaatgtagtttacaaatatgtattcaaatattttttctctaacaagtgaaggaaatcatctacttagacatttagagaaaactttaaacagttgctttagagtctgtttcttagtattacgttatgttgaacattcaaatcaagatattttatttctgaattttgggtccagactattaataatattaaaagtttacctacctacattactaaatgagaaaggcatttgaaatatatatatatataaaatataaatatatatatatatatttcttcatcttataattccaggaaacatatgttttaatttatatatatgtgtttatatatatatatgtatatgttttaatttatgtatgtttcctggcattttaagatgaagaaacactttttctctgacccaatttcttaacgtttatctctttaaaaaaaaaaaaaatgtactggctgggtgtagtggcttacgcctgtaatcccagcactttgggaggcccagatgggcagatcacctgaattcaggagttcgagagcagtctggtcaacgtggtgaaaccctgtctctaccaaaaatccaaaaattagctgggtgtggtcgtgggcacctgtaatgccagctactcgggaggctgagcaggagattcgcttgaatccaggaggcggaggttgcagtgagcaagttcacaccactgtactccagcctgggcaacaagagtgaaactccttctcaaaaataaataagtacaaaaattagccaggcgtggtggcgcacgcctgtagtcccagctactcggaaggctgaggagggagaattgcttcaactcgtgagacggaggttgcagtgagctgagatcacgccactgcactccagcctgggcaacacagtgagactcctctgaaaaaaaaaatagtatttttattggaaaatcagagttttatacattacagtgtacaaagtgatgttctgatatatgtatataaaataagtaaagttacataacgtatcaataacctttttgtggtgagacatctgaaatgtactcctattttgaaataatgcattattgtttactatagttatgctgctgtgcaatagatctcaaaccctatttgcctctgtctatttgaaacgttataccctttaacaaatccctatttccctctcagacccttgccttctagtcaccattatttcactttctacttttttgagttaaactttattagattctgcatataaatgagatcatgcagtgtttgtctttctgtgtcagacttattccctctagcatagtgtcttccaaatttatctatattgtttcaaatggttggatttaccttcttttaaggctgaattgtattccatttaccacatttaaaaaattaaatatatatttatttgttgataaacgtgtgttatgtaaaaatatttgtgttaaagcacatattaatgtaattcagcatatgaatatcttattaatagctaatttgtactgagcactaaccataacattatttatgtgttaatggattttaattctcacagtaacttaatacatctaaacactcatttttaataaaaatcaaaaattgaatcatttatattgttataagattgtatagaatggtacatgaaaaaataatttaagcaaaaaagatattaatatttgcaatacataaaattggaaagcagttaattatttggagatgatatctttgtttacttagataacaaaataaactataagactattttaaaagtctattcaggtgggtaggcaaaattctaagatgatcccaaggattccaggtctgttgcacatctgctgtgcattccttttctcttgagtgtaaaaaaggtgtgactgtggtgagaaatcactcatgaaattaggttactaatatgttgacttggtgttcatcaaaagggagattatctcaatttggctaaactgaattagaggtgcttttaagaggaagagacacatcatagtaaaacactgctgcttgcctggaagtaagtgacttctaggtgggccatgttgtaagctgcttttggtggtcacatggcaggaaatgtttgtatattgtaatcatttctgcttcccacatgttgctttccacaggaagacagaagaattccatgacaagaaaataaagggtgggggggtctcattcatgcaagaaataatcacttctcatttgagatagcattaaggtgacagaaaaaaccacaacatgaccacatcaatgagaggaaaaagacaacacggtcgaaggtgctcactggcattatggagaaacattttgtaagccatagtgaatgatcagcctctgggataccggtagtctactaagaaagctaaactcattctaataaatcagcatatctgcaccattctggttggcccagttttacactatccatttcagaaataccatggagaccagtgggtaccctcctaaaattgaaattataattagaaagcatacctaattatttgttttcataattgaaaagccttgaaaacaatgaatttattaataaggaactgctaattttagaagatcctattatactgtattacaacattgaactttaaacaccttgagtatttcttgaatgcataaacagttacgtagatagtttctcttagattaacatgataaaggtaacagaaaacatttgaaatggaataaaattaaagccacatgttttcaatgtcttggcgtaattgccatgctttttaaaacggccagaaaaataaataaataaaaaacaataaaacagccagttactaccaagaagcaaagacaagattttagctttgctcaatcattacatgattgacctttagaaatctaaaactctggctaaaaaattaggagaaattttttttttaggtaacttcctaggatttctgaggcaacacaagaattctgataggcagaaaaaaagcatactaaatatacacattgctcttctctgatttgctttaacattaaaagattaaaaattgcaaatataagctaaatttagagtatgttaacaaaacatttatttttcagccaagcaaataattatataaaattaatgagtaacagatgccatcatctgccaaaaaatagtatgactagattcagtaagtgtctagccatgaaaatgacagcccaattaaattaagaccctaataggtgcatgtggaaagcatgtgcaaaggtgctgcacctccacttagcaccttcttctgcctctttacagagacaccaatttccctagtgacttctggtgaatactgggaactaagaatgcattgttcagagcgattactgagaacatggttaacacagttttttcatattataataaaattttgtaaatcttactctacctctgaaaggcttttagtaaaagaattgtttatgtatggtactcaatttggattcatagaaaaatttacttttccaggtaaatcagagacacatgtcaatcaaattctataatacatacttgaatgagataaagtcttcttagctaagaattttatttcattagtacattaagagaaaaatagaaaaccagtactttgggcccaaaacagagtttggcatgtgagtaccactcaaacaagtgctctttgctctttatcatcactgttaaagtagcaatagcactgcgtgctttcctagaaccagctggcctgttttctactgataaaagtggagaaagcattgaaatagtggagggtaatataaattgaaaacttatatgaaatacaatttttaataaaaagcatttgatgttgtacaactccaggtgagactattagtgtgaggtcatatttttacttctattgacagaaaacttaattgacaatattctgatttccagtgatattcatttatctgctgtatatttgctcgctttagatcaatattacctgagctcaaaagaaatcaaccaaatgaatatccacgagcattttattattgatgcatatgcttattttgcttaaagtatgttagctttttatcaaagatttatacttttggtgtgttttttactgctgagaagtggctattctgccaggaaactggcattctcagctctacccacattgactaatagtgagtggaagtgatgtgtggatgaaaagcaaatgtgtcttctcagcatctcctttttcatccattggctgaagaaagagaaggacgcagatagaaaatgaaagtgtgccgggtgttgtggctaacgcctgtaatcccagcattaggaggccgaggcgggtggattacctgaggtcaggagttcaaaaccagcctgaccaacatagagaaaccccgtctctactaaaaatacaaaaattagccaggtgtggtggcgtgtgcctgtaatcccagccactcaggaggctgaggcaggagaatcgcttgaacctgggaggcagaggttgcagtaagttgagatggccccattgcactccagcctgggcaataagagcaaaactccatctcaaaaaaaaaaaaaagaaaaaataatctctgaaagatcatgaagaagtcctctcaacatcaaaagaaaaaaaccagaggatagtgatgtcagcagaaaatatattattttgctaagcctctggaatttcagcatacatcctgcattactttaataaatatattatttcttcagttttcttttttttttgagacagagtttcgctcttgaggaaaaaaaccagaagatagtgatgtcagcagaaaatatattattttgttaagcctctgaaatttcagcatacatcttgcattactttaataaatatattatttcttcagttttcttttttttttcttttttgagacggagtttcactcttgtcgcccaggctgtagtggtgcaatcttggctcactgcaacctccacctcccaggttcaagcgattctcctacctcagcctcccgagtatctggaattacaggcacccgccaccatgcccagcttttttttgtatttttagtagagacggggttttgccatgttgggcaggctggtctcaaattcctggcctcaggtgatccacctgcctcagcctgccaaagtgctgggattacagccgtgagccatcgcgcctggcctgttttgattcttaaggatataattcacttccttgttgaattaaaactgataggagaataattcatttgttaaggtaagtggtttagggaagacccattgcttttgaccaacatctccacctccagtcccaggcattattctattttctgcttctgtgagcttgaatatttttaaactctacataaaaataagattgtttggtattagttttttctctgctgacttatttcacttagcacaatgtcctctgggtttattaatgttgttgcaaatagcaagactttctttttaagactaaatagcattccattgtgtaaatataccacattttctttatccattcccttgttgatgaatacttaggttgacttcatacattacctattgtgagtaatccacatcctttactttcatttgtttttatatcatttttccttcctttttttattcctagaagtagattattcttaaaatgtaaattatgactgttaaatattttctatgccttattttggttaatattttggctgattaagaagataagtttctaaaaaattttttcgatcaaagccatttcttcattatcaacatcgtttgagacaaaatagtaataaacatcaacatcgattaaacaattatctaaccctataatcattttctaagctgcatctttgtgtcatctctctcggttataagaaagaggcttctgattttcaacataaaattttgtaaaatttaaccttttggtctgaaaattaaactgatcagttaccagaaaagttgatttttgatacatgttattgtaattgtttctacttaaattcttcagaaaacccaaactgacaacaaatgcatttaaatttttttgaaaattaaaagtgcctggccaggcacagtggctcacgcctgtaatcccagcactttgggaggcccaggcaggcggatccccaggtcaggagatcgagaccatcctggctaacatggtgaaacccagtctctactaaaaacacaaaaaaatttgccaggcgtggtggcgggcgcctgttgtcccagctactcgggaggcagaggcaggagaatggcatgaacccgggaggcggagcttgcagtgagccgagatcacaccactgcactccagcctgggccagactctgtcccaaaaagaaagaaagaaagaaaattaaagtgcctaacaaacatttttgtagaaattaaaaatacttgtagattttcagagaatgtctctcaaatacttcaagttaccttcttctgatcgtagatacatatttttctatattgctataatagagttttggctgtcctttgtggccagctccttcatttctatcttatttagttgtgcattatttatattacgtattttacattttaaaacttgtagaccatgcaatgtaactttcaaacaattgaaaaacctttttctatgttagactctctgcttaatcagtagtcagtttattttcacccttcaaaaacattttaactgcctgaaaatcaaagggacagttcaagtgagtattctgagctggttctctccactatcaatctattcaaattcacacaggttatcttataaagaaagtgcacttgaacaacattgtcacagcaatgtaaaacaggtataatataataaagatgagacactgccttctaggaaaagagttaatttttcttattctgtgtatgtgagtatgtggcagctgtaaggttgtcaataaagactaaagttagagagggagagagaacactttacattagtaatgcagcgtagttcctatgcagccttcttgtttgtcaaacatctcttgaattgttttgtcaagtattatgttgctgtatccatcacttattagactttgatgattatcttctactttatcaattaagtatgcaatcaacatcattcagagtcctgtccttgatgtttaagtactcagacataaaactattaaaatattgattaaaaaatgagtttgttttttttttttttttttttttactacagagcatttcatgccagtaagcttaaatctcttgaacttttgaaaacatgctttagtttatctttagcttggaaagcctaaattggtcaaaagcaaatataacaataaacttgaatataaatcattttggaattgaattcaaattataaaataaaatattaaatttgataaatgtattttactgtgtgtcagaaattttacaaaaattttgaatagtgtaataaagctgaaatggaaatacatacatgcttttatgataagttattttgtgatttaaatttttaatttaacagtgttatatagtagacttcaataaaagtagtctgtgtttaaaatgtgcatattgacatatcagagaagaaaatattgataataaagaatacaaaacaaaccatgacagtcttgatggctgttgtaagacctcgtttcttgtcttcttagttaaaaaaaattagagacacacaacaaaggaaatgaagcataaagtattgcaaaggagaatgactattttaaaagttaggtgcagaatagccagtacaccctgagagagaagggattcaaggcaggctgcttataagaatgagacagaaaagactgtgactagggagactgtatttatgcaaatcttacttagttatttataaagatgtgggaaggcagggcgcagtgcctcacgcctgtaaccccagcactttgggaggctgaggcgggcagatcacaaggtcaggagatcgagaccagcctggccagcatggtgaaatcctgtctctactaaaaatacaaaaaattagccggggatggtggtgtgcacctgcagtcccagctactcaggaggctgaggcaggagaattgcttgaacccggcaggcggaggttgcagtgagccgagatcaagccactgcactccagcctgggcgacagaggaagacttcgtctcttaaaaaaacgatgtgggaagaggtgttactacaatagcatgttctaggtggttctcttggtgcacaaacacagtagctgtacatgcttgttcatacgtcgcatgtttcataagcatcctaaatcactcacaggtgtgcattttcctattatgagtaaaaggttagtttgagaacaggtaaaatcaaaatgtgcatactatctaactggagaaagtgttgcttgaatgagctgaaatactatgcaaatgctgtggtttattttgttgacaatatgcagtcatcatgcaatcaccatggttgttgcatttcaaggacatggtcactttcttgattacctatcctgcctaaatagtacgtcttaatttattcccaacttccaactctgtgattaagatttagctgttatgttaccatagacaatagtgggaaaaaaattttttttttttttgagacggagtttcgctcttgttgcccagacaatgcaatggtgtgatctcagctcatcgcaacctccgcctcccaggttcaagcaattctcctgcctcagcctcccgagtagctgcgattacaggcatgtaccaccatgcctggctagttttgtattttcagtagagacgtggtttctccatgttgaggctgttcttgaactcctgaacttagatgatctgcccgccttggcctcccaaagtgctgggattacaggtgtgagccactgggcccggccaggaaaataaaaattttaaaaataaacatatgtgagctttatctaggttattagctgtgtgtgcccaggagaaattattttacatccttggagcttcaggattcacaattaataaaaattactatttcccccggggctgttttaattcatacatggtagctgtaagtattttttactgaaactcttgtctaaatatattatagtaaatattaagaataaaattattcatatttcaaatattttattgtaattgagtgagtatattttgtcatatttcgtgtatttatccttttttaaaaatgccagccagcctcggcctcccgaggtgccgggattgcagatggagtctcgttcactcagtgctcaatgttgcccaggctggagtgcagtggcgtgatctcggctcgctacaacctccacctcccagccgcctgccttggcctcccaaagtgccgagattgcagcctctgcccagccgccaccccatctgggaagtgaggagcgtctctgcctggctgcccatggtcggggatgtgaggagcccctctgctcggctgcccagtctgggaagtgaggagcgcctcttcccggccgccatcccgtctaggaagtgaggagcgtctctgcccggccgcccatcgtctgagatgtggggagggcctctgatccgccaccccgtctgggatgtgaggagcgcctctgcccggccgcgaccctgtctgggaggtgaggagcgtctccacccggccgccccgtctgagaagtgaggagcccctccacctggcagccgccctgtctgagaagtgaggagcccctccgcctggcagccgccccatccgggagggaggtggggggcagcccccgcccggccagccgccccttccgggagggaggtggggggcagcccctgcccggccagccgccccatcagggagggaggtgggggccagcccccgctcggccagccgccccatcgcgggggaggtgggggccagcccctggcccgccagccgccccgtcagggagggaggtggggggcagcccctgcccggccagccgccccgtctgggaggtggggggcgcctctgcccggccgccccttctgggaagtgaggagcccctctgcccggccgccaccctgtctgggaggtgtacccaacagctcattgagaacgggccatgatgacgatggcggttttgtcaaatagaaaagggggaaatgtggggaaaagatagagaaatcagattgttgctgtgtctgcgtagaaagaagtagacataggagattccattttgttctgtactaagaaaaattcttctgccttgggatgctgttgatctatgaccttacccgcaacccggtgctctctgaaacatgttctgtgtccactcagggttaaatggattaagggggtgcaagatgtgctttgttaaacagatgcttgaaggcagcatgcttgttaagagtcatcaccactccctaatctcaagtacccaggtacacaaacactgcagaaggccccagggtcctctgcctaggaaaaccagagacctttgttcacttgtttatctgctgaccttccctccactattgtcctatgaccctgccaagtccccctctgcgagaaacacccaagaatgatcaatttaaaaaaaaaaaatgccaaaataagaatttttttttttttggaataccaggctaagagtttctatattgtgactttgctaagtttttttttttttttttttaatttatttttttattgataattcttgggtgtttctcacagagggggatttggcagggaaggtcagcagataaacaagtgaacaaaggtctctggttttcctaggcagaggaccctgcggccttccgcagtgtttgtgtccctgattacttgagattagggagtggtgatgactcttaacgagcatgctgccttcaagcatctgtttaacaaagcacatcttgcaccgcccttaatccatttaaccctgagtggacacagcacatgtttcagagagcacagggttgggggcaaggtcacagatcaacaggatcccaaggcagaggaatttttcttagtgcagaacaaaatgaaaagtctcccatgtctacttctttccacacagacacggcaaccatccgatttctcaatcttttccccacctttcccgcctttctattccacaaagccgccattgtcatcctggcccgttctcaatgagctgttgggcacacctcccagacggggtggtggccgggcagaggggctcctcacttcccagtaggggcggccgggcagaggcgcccctcacctcccggacggggtggctggccgggcaggggggctgaccccccccacctccctcccggacggggcggctggccgggcggggggctgacccccccacctccctcccggatggggcggctggccgggcagaggggctcctcacttcccagtaggggcggccgggcagaggcgcccctcacctcccagacggggtggctggccgggcaggggggctgaccgccccccacctccctcccggacagggcggctggccgggcggggggctgacacccccgcctccctcccggacggggcagctggccgggcagaggggcacctcacttcccagtaggggcagccgggcagaggcgcccctcacctcccggacgggtcggctggccgggcgggggggctgaccccccccacctccctcccggacggggcggctggccgggcggggggctgacccccccacctccctcccggacggggcggctggccgggcagaggggctcctcacttcccagtaggggcggccgggcagaggcgcccctcacctcccagacggggcggctggccgggcggagggctgacccccccacctcccacccggacagggcggctggccgggcggggtctgacccccccacctccctcccggacggggcggctggccgggcagaggggctcctcacttcccagtaggggcggccgggcagaggcgcccctcacctcccagacggggcggctggccgggcggagggctgacccccccacctccctccccgacggggcggctggccaggcggggggctgacccccccacctccctcccggacggggcggctggccgggtgggggggctgaccccccatctccctcccggacggggtggctggccgggctgaggggctcctcacttcccagtaggggcggccgggcagaggtgcccctcacctcccggacggggcggctggccgggcgggggggctgacccccccacctccctcccggacggcacggctggccaggcggggggctgacccccccacctccctcccggatggcacggctggccgggcgggggggctgaccccccacctcccttccggatggggcggctggccaggcggggggctgaccccccccacctccctcccggacggggtggctgccggtcggagacgctcctcacttcccagatggggtggctgccgggcggagaggctcctcacttctcagatggggcagctgccgggcggaggggctcctcacttctcagacggggtggttgccaggcagagggtctcctcacttctcagacggggcggccgggcagagacgctcctcacctcccagatggggtctcggccgggcagaggcgctcctcacatcccagatggggcggcagggcagaggcgctccccacatctcagacgatgggcggccgggcagagacgctcctcacttcctagatgtgatggcggctgggaagaggcgctcctcacttcctagatgggatggcggccgggcggagacgctcctcactttccagactgggcagccaggcagaggggctcctcacatcccagacgatgggcggccaggcagagacactcctcacttcccagacggggtggcggccgggcagaggctgcaatctcggcactttgggaggccaaggcaggcggctgggaggtggaggttgtagtgagccgagatcacgccactgcactccagcctgggcaccattgagcactgagtgaacgagactccgtctgcaatcccggcacgggaggccgaggttggcggatcactcgcggttaggggctggagaccggcccggccaacacagcgaaaccccgtctccaccaaaaccagtcagggtggcggcgcgcgcctgcaatcacaggcactcggcaggctgaggcaggagaatcaggcagggaggttgcagtgagccgagatggcagcagtacagtccagcttcagctccgcatgagagggagaccgtggggagagggagagggagagggagagggagacggagagggagagggagagggagagggagagggagagggagagggagagggagagccttgttcgcttaatttaaaaaaaaaaaaatgccaaaataagaattttttttttttggagtaccaggctaagagtttctatattgtgactttgctaagttttgcatatgattttgactgctaccattgaactcaggttgaatattaaacccacttttgtttagcttgtgtggtttttggttcatccgtaaaacaaaatatattatacatgaactgttggggtaacttggcttcatttttgttctctttctgttattacatctgtggctttagaaatcactaagattcggccaggcatggtggctcatgtctgtaatcctagcactttgggaggccaaggcaggcagatcacctgaggtcaggagttcgagaccagcctgaccaatatggagaaaccctgactctactaaaaatacacaattagcccagcgtggtggcacctgcctgtagtcccagctactcgggaggctgaggcaggagcatcatttgaacctgggaggtggaggttgtggtgagccaagatcgcaccactgtactccagcctgggcaacaagagcaaaaatccatctcaaaaagaaaaagaaaaagaaaaagaaatcactaagattcaaataacgttagttgggactcaagcaacagaaaatcccaaaaatgactcagaaaaatagctactggatagtgcctttcagtgagatttatacgtgaaacagaagccaatatattttacaaacttattgcaagttcattaaatgtagaaaataattgcctgcaacatattaggcacttgtcttagtctatggcatccctagcttggggaagctgacattacagaaaagaatattgctactctaatgagatttggaacaaatacttatgtgcttttaaacattctctttaataatccttagatacatgtcattctggctcaattcttttagtataactgtctacagttctagagactcagtcccatcaaatttaagccatggtattttcagctttttatgtttatttttagctagtgagcttaatagttgatattattatattggggtcaccatggcaatctgggccttagagttgaccatcctacctcatcctttttgtttcacatgctctgttgttgaatccctctcactttatatttgagccttaaggaggcttcagtttggaggaaccagaggaatgggtttctatatatattgagttgagaattagaatcctcttaaggatagagatcttacatttattatttacagtacaaagcagtatttataggatgtagacatattttattcaaatataaataattttatcagtatgccaatgtggtcaaaataactgcatcaacttcacccaatgttctgcttcagactctgccaacacaaagatcaatatgtatgcattcgtggatgttagtttttttttttggtgtaggttttcgtttgcttaaatttttaaagattttgttcctacattatgctgatgttaagctaaagaagtacatctaactgccattagaataaagataatgataagaatgatgactaatcttaactgctgtctgctgacagggggcactgttttggcaagtcagcagtcagatctccctcagaggcctatgtaagggtctccagtaaaacgtggccatcatctgaggctccagttgcatggccatttggagtttaatggcctgaatgcaagaaaagacaaactgggttattggaagacatgtattaaaatgaaacaagagggtaatgacagcacaaaaatcctaaggctgctgacacacccagataacaggtggctatagttatgcctgctaagatttgggtgcatggggcttggatttcgttagctccattgttcttattttcccaaacatagaaacctccaggttatgggtactctagttactcctatcacctgacaggatttgcgggataattgcccagaactgaaatgtggatccagattgttacattaaccattcctttctgtttcttctgcactgtagctggagatcactggttgatttcacaggaataaacagggttagtctaaattgcaaggaaaaacttaaaaactaatgagactataatttaatgacaagtgtatgatcagtttggaaacataatttttctctccagttctcatttttgttaaaaacacatcatgataggactgacttgtttgcaaaataaaatttagtcttatacttggcctgattgtttgtataaagtgcaggaagaataattatttttaaataggcttttaaaattcactttgatgggactctgttctacaaggaatctatgatataactttttaaagccaagccccctcatgggtttgtaatctcaaataccgaggaattaggtgaattcctttcttcttgagttcccaagtatatggggttcctgggcctgttacaaagtgacattttttactcaacacatgttaggaaccctgtacagggactgtgtagagaggtatgagaccagtttgctctaggagcttttattggctctgcaagttgagcctgattccttaaagggaagcatatttttccagtcaaagccttggtaaaacaaccagtttctccaattgtaccctgtcacaaaagaaaatggattcttattgcactgatgcaaacaaccatattaccataagttaagaacactcacagataagcttccaaattctgtagaaactagccagagaaaaacaaatatgctccaaattttgttcacaggagtatactttactcaattattaaaggctgtaaatagctcaaggtaagtttccttgactatggaaaacaaaacaaaaattagcaatgtttgaagcaaaaagttgaaaaaaaaattacttcaatttcctattagtttagtccattgagctaacttttgttctgcttgatattcatgaacactttagctcttcatgagttctgtatgtttctcctgtatttcaatgtcacaatctctaaatttatcagaaacctgtatttgagagcacctgttaaagtcctatagctgattataaaccatcttttgaaaaagatgaaaacaagaaaacaattgtctgtgaatgacaacatgtccagggaatagtccaaaacacaattgaggccaggcacggtggttcacgcctataacccagcactttgggaggctgaggcgggcagataatctgaggtcaagagtttgagaccagcctggcctacatggtgaaactctgttcctactgaaaatacaaaaattagccaggtatgtttgtgggcacctgtaatcccagctacttgagaggctgaggcaaaagaatggcttggacccaggtgatggatattgtagtgagccgaaattgtaccactgcactccagcctgggtgacagagtgagactccatctcaaaaaacaaacaaacacaattgacaaataaattttgttatctctgttttacaataacatagcaacctaactgtgattgatagcatatatttagacattagaattctagaaatcccatacaattttgaaacacatattaatattattcactaaaatattatgtgaggaagattaaacattattttggcaatcccatctacctaaacatgtcaaataattctgattttctctcttctggatgctccaggggttctctgtatcactgaagcatccaaaagctaggggtcaggaaagacaaccttgaagctgaaatttgattttgggaagcctgtcaaatattagaggttttaaatacttgatattatgaaatacaatttcaagttaccataagttatttattttgccaaaatgataacttgaaaattttaaaacaaggcaaaagcctttacttattaagaggggagacttagctttctaaacaatttgtcttttctcttttctttcttttctttggcagtctacctgcaaggtaaacagaaatgtttcattaatttttcttttttttttctccagacagagttttactttgtcacccaggctggactgcagtggtgcaatttcagctcactgcaacctccacctcccagatacaagcaatcctctcacctcagcctcttgagtagctgggtccacaggcacacacaaccatgcccagctaatttttgtgtttttattagagacggggtttcaccacattggtcagtctggtcttgaactgtagtgggatattttacggaatcagagagaccaaggggttgaggaggatatttattatttaggtgcactggcccagtcggattaacatccaaaggactgagccctgaacaaagagctaagtcaccttttaagcatttcgtggggttgggagagatctgtgcagagggaagcattttacagaagtgagaaacaaagacagttattcaattaattgagacatgcactacatcatctcttactttttaaggaaaaacattttttatgacttgagtttatctgtctagtgacaatgcagctgcacagctagagaaacagggtcttcacaatgcctgggaaagagtgagataaggctcgctagccacagaaaaacaggcagttaatttttaaaggactccagcctttctctttctcagggagggattggattttcttacatacaactgagtttctgtttacacattctttaatttcttttaattcctgttccagaactcctgacctcaggtgatctacccacctctgcctcccaatgtgctgggattacaggtgtgagccactgtgcccagccattatcttttactattacatgaaaatcttgtacaaggaagagaaagccaaattttactcttgcattagtctactattaatatcaaacctaattttctaatgaaactatataggcaattctatccaatcttaatcagtttgaccataaggtaaaattcttataaaccttttgtaatcatttataaatttgctaaagcacagactagtgccttacggaaatgtttttcttttagttcaatgcacaatttatggaataacaactatataataccctcttgaatttagtcagtatgttcatgcacagaatttcttttgcaatattaatttttatagtccatccacaatttgtttaaaccatcagttttttttttgtttttgagacggagttttgctcttgttgcccaggctggagtgcaatggcgtgatctcgactcagtgaaacctccacctcccattttcaagcaattctcctgcctcagcttcctaagtagctgggatgacaggcatgccccaccacacctggctaattttgtagttttagtagatacggggtttctccacgttggtcaggctgttcttgaactcctgacctcaggtgatccccccgtctcggcctcccaaactgctgtgattacgggcatgaaccaccatgcctggccatgtcattcacatctgctagtttgagcctgccttgatgcctccacttcccagtttagataattgggtgcttatattaacctgagctgaatttattggtttactgctatcagctttatcttatctaattcaaaataatcctttaaacctaggtaaaaatttaaactttcatcccttttataatcttttactaaaacatattttgctgttcttacacacctggcatgtaaattcatttttagtggtctttattacatgttataatggtaactcagcaattttaaactttaatgtaaaacctggtaacttattttaattatgtactaagggcagataaagttttactgtttccagcatagttggccgggctgatcttgaactcctgaactcaggtgatctgcccaccttggcctcccaaagtgctgggattccagacgtgagccactgtgcctggccttattcagcatttttaactttgggtgagggtctttaagctgaagctagtttatctctggtcctgtcctcaccagaataaaacataacattcttgacatccggatatagtaatacataggtagattgataaataaatatgaagagaattatgtttttcatgcaaatatttatgcatacaaaagatgttaatcaagagacattttcaatacatcagccaattttgaggacatagatgaaaatttacttctcatctatatgtctccattccatcaaagactcaaatacacccaaacaatgttatgtgtagacatcaacaaaccttcacatttacaggcatggcctgggaaataagtttttactattaccatttaagtctttgtgtccagcttagaatttcagaaccctgcatttcttctcctggtatgcatgtgttttttacatccacaattttgggcctgccctgatttctctattttccaattcggctaattggctcattatatcctcccaagctaagctaattggcttattgttatcatctgggttgtgctaattggcttattgaattcacctgtgcatcagggatttaaaaaaatgatgaccactgaccaatttttttttttttttttttttgagatggagtctcgctctgtcatccaggctggagtgcagtagcctgatctcagctcactgcaagctctgcctcctgggttcacgccattctcctgcctcagccccccgagcagctgggaccatagatgcccgccaccatgcctggctaattttttgtgtttttagtagagacggggtttcaccatgttggccaagacggtctcgatctcctgaccttgtaatctgcccgcctcaggctcccaaagtgctgggattacaggcatgagccaccatgcatggacttttttttttttttttttttttttttttttttttaagatggagtcttgctctgtcacccaggctggagtgcagtgttgcaatcttggctcactgcaacttctgcctcccaggttcaaacgattctcctgcctcagcctcccgagtagctgggattacaggcacccaccaccacacccagctaatttttgtatttttagtagagacggggtttctccatgttggtcaggctggtctcaaactcctgacctcatgatttgcctgcctcggcctcccaaagtgctgggattacaggcatgagccaccgtgcctgaccaaaaggtttttttttatactgccctcagtacaagtagctatcaatatcttgagcttctatattttttattctgcatgaatatggagagaatgctagatagatgattatagatgtacataggtagagaaatattttaacacatacatgcagcattatattagtttgtctatgtaaatgtttatgtatacaaaaaatgttcatcaagtgacattttcaattcctcagcctatcctgaaaacaaagatgaagacatacttctcacctagatggctctatacaattacggagtgaaacggagccacacaatgttatttataaacatcaacaaaacttaatgtttatggtcaccacctgggaaataaacttttagtactgccttgtaagtctctatgtctagcttaccactttaggggcctgcttttcttctatctgtatgcctgtgtcattcacgtctgctagtttgagcctgccttgatgcctccacttcccagtttagataattaggtgcttatattaacccaagctgagtttgttggtttactgctatcacctgtgctgagttaattggcttaatgaattcacctgcactgcaaatgtaataaaggagatgacctctagtctacttttcttcggatgctttttttttaacaggacacatggacaaatgaccattacatagatatacccatggaagttattatgtgtgtatatgtttatttatgcagctactttatatctatatatctatataggtatgtacagaataaagcttccaaagttaactaggtcagagttcatttccattttcttttcctccatgccatttaaatatgattagcaaattagttcagttaagttgtattcagtctgagccatacacatcacatttttttcataaatgtgaaactgcttttgtcacctgaaaccctgtagtttgtaattgtgtattctattaaaccactccagcggggttctgtccattcagctagaaacagccagatatgcctgacaccagtgtgcctagccttcatcacaaagcaaatttgacctgggcaataatagccatttttggcacttcagtgaacattcactatcacctggttgaaatgtggccaggtaccatgcactgttataattactttcagtatcaaagtctatcttctaaaaagagatctagacttttttccattaccatagacaccctacatcagcaacaaagagtagttgacaatagtgcacatttacattacacattcatgaagaaaagaaaaactcatcttgatggaggccccagtgagaaagaataagcattctgaaattgaggttagggtctttgtcctgggactggtttatctctggtcgtatgtacagcagaaaacgaaggatcaacattgacatggcaatgagtgactcccatggcttaagtgcatatttaaatgtgggtgagggcctttaagcgaggctagtttatctctggttccatgttcaccagaatcaatagaaacctttttttttttttttgagagggagtctcacactgtcgcccaggctggagtgcagtggtgccattgctcactgcaacctctgcctcccaagttcaagtgattctcctgcctcagccacccaataggaacaattttaacttaacaataaaaacctctttgggctttaataaatattattcttacagataagagcaataaagctaagaggaacaaagcttcacatttatgggcatggcctggatagtaagctttcagaactacctcgtaagcctttaagttcaggttagcattccaagaccctgcttttttctcaggtatgcccgtgttattcacagccatcattttggcctacctaaatgcctttgctgtccccatttggctaattggctgattatattcacctgagctgagctaattggcttattgcaatcatgtgggctgagcaaattgtcttactgaattctgggctgcagggatagaaaagtaagaccacctctgacctacttttattctgaagcttttttttacaggacagatgcataaatggacattttgtagacagacccatgtaatctattctgtgtttatatgtttatcaatctactgatcttatatctatgtttacatgtacaaaaagaggcccctaacataaactatgtcagaggtcatttgcattttcttttcctccaggccagataaatctaatcagccaatttgctcaataacttttgtttgattcaagctacccaccacatcacttttttgataagtgtgaaaatgtcctacttacctggaacctgggttcttttaattttgcctctcaccaaaccagcccattgggattctgttcatccagctaggaaatttaaaaatacctgacaccagtgagcctagccttcctcacacacaaaaaaactttggcctagtcaacaagagtcacctttggcaccttattgcatgttcgctcttgcttcacaggaatttggccagacaccatgtactcttatatttgctttcagtatcacagtctatcttctaaaaggagagctagactttctttccattaccataaagaccctacttcagccacaatgacaaaaagataagattgcacttttacatcacacactcatggaataaagaagcaaaaaccactgtctttttttttttttctttgagacaaagtcccccaggctggagtgcaatggcatgatctcaactcactgcaacctccgcctcccgggttcaagagattctcctgcctcagcctcccgagtagctgggattacaggcacctgccaccacacccagctaattgttgtatttttttttttttcagttgagataaggttttgccatgttggccaggctggtctagaactcctgacatcaggtgatccacccgcctcggcctctcaaagtgctgggattaaaggcgtgagccactgcatccagccataaaaaaaccctgtcttgatggaagttctaatgagaaagaataagcattctcagatgtgggtggccattggactttagttggtttatctctggccctatatacaacataaagaaagggtcaactttgacatgacaattaatgagttccatggccttagtacatggccatttcacagaagtgaacaaaaaggacagctgcttttttcttttatgttaaatgcagcaaaatgtatgtcagaacatacctctatttgtgtattattctagatatagtctatagagcaaataagtttatatatctattaaagtttctctctttttttttttttctttttgagacggagtcttgctctgtcccccatgctggagtgcagtggcacaatctcggcttactgcaacatccatctcccgggttcaagcgattctcctgccttagtctccctagtagctgggactacaggtgaccaccaccacgcctggttaattttttgtacttttagtagagactgtgtttcaccatgttggccaggctggcctcaaactcctgacctcaggtcatccacttgcctcagcttcccaaagtgctggggctacaggtgtgacccaccacacacagcctaaagtttctttctatattgcaattagtaccaatatttaccaatacttccacattctgtatctctattctttttaaatatgaatacaaagattggcacatcaggatatagatatacataagtaaatagattttaaaaacttacaggattatatgagtatgtctatgtaaatatttatgtataaaagaaatgttccccaaaagatcattttcaatctcttaacatatactaatgatgcaagtatagaattacttccaagctcctttgcacaacagaatttcagaatggaacatagccattcaatattgtttatataagcataaaaataccttcaccttcagtagcataggcctcagaaataagctgacagcaaagccatgttatacatgctgctttgatgaagctgcagttgttatttgaataatttcttgattggatctacctgtgcaaaactaattggattattggaataaactaagctgagctaattggctaattggatattcctgaactgagctaattggctgattgaaatcacaaggtttcagctaattggctgattggatttactagaacttagctaatttccttattaaaatcacatgagctaactttcaggttagaataacctaggctaagctaatcagcccattagattcacctgggctgatctcatgggctgattgaaattgccagggctgaactaattggctgtttggaatcacctgggctgagctaatttactgattggaattgcctgggctgagctgattggctaaatagaatcagttgggctgagataattggctaatggaaatgacctgggctcagctaattggctaattggaaacactcgggttgagctcatcaaccgattacatttacctgggctgagaaaattggctgattgtattcatctatcttgaggggcatgagtagggacataacctctgacttacttttcatttgtgagtttcttacaaaacatagtcacaaatgaacattacatacacgtatttctatgaccttgtgtctttgtatatgtttatctttttatttttgagactgtcttgctttgtcccccatggtggaatgcagtggtgtgatcacgactcaatgcaactttttcctcccaggttcaagtgattctcgtgcctcatgagtagctgggattacaggtgtgcaccaccatgcctggctaatatttgtatttttagtagagatggggttttgccatgtgttcaggctacggtcttgaactcctggccccaagtgatcaactcgccttggcctcccaatgtgctggaattacagacgtgagccagtgaacctggatgtgtatgtttatctatctacatacattatatctgtatttaaatgtacagaaaaaaagtgtccaaaaaaaccctgaagtttgctttcagtatagcagtctatagtcaagtcccagacctcgtgttttattttcttacccaaaatgtcactaagtaagattttgcatttatggaagtttttctttacattgctataaatgcaaatacttatttatcctttgacctcctatatctttattttgtatgcaaatggaaaaaatgatagatctgtatatagatatacatgagtagataaatatgaatatagaattatatgagcatgcctatgtaaatatttatatatataaaagatattaatcaaaagacattttaaattccctagcctacactgaagatgcagatgtaaacctactctaacccatatggatccacaccatctcagactggaacacagccatacaatgttatgtttaaatatcaacaaagcttcacatttaggtgcattgcctgggaggtaagttttcggcaaaaccatgttagactctagttccagcttagcatttcagggccctgcttcctttctcactgtaaacctatgtgattcacatttgccatttggggtctgcctggatgcctgcaacttcctaatttagctaattgacttatatcaacctgagctgatctaagcagctcattaaactcaccttggctgcagaagctggaaagaaaaatgacctctgacctacttttattctgaggcttccctacaggacatatgcaataaagatcattacgttgatatacctatgttacccattttctgtgtatatgtttatctagccacctatcttatatctatatctatatgtacaaaagacagccaacaagagtaggtcagaggtgatatttatttttttcccattcaggccaggtaaattcaatcaaccattagcttagtgaagatttatcaaattcaagccatacagcaaatcatgcttttttttttttttgagacagagtctcaccctgtcacccaggctggagtgcagtgggtgcaatctcagcttattgcaacctctgcctcccaggttcaaaggattctcctgcctcagcccccagaatagctgggattacaggcacccaccaccgcgcccagctaatttttatatttttagtagagacgggatttcaccatgttggccaggcttgtctcaaactcctgacctggtggtttgcccacctcggcctcccaaagtgctgggattacaggcatgagcaaccacacccggcctcaaatcttgcttttttaatgtaaaaatgtcctcattacacagcaccagggtgtttttaactcggtctcatcaaactggcccatgggattctgtccatccagctagaaacattcagacatgcctgacaccagtgggcctaacctttttcacaaaggagctttggcctggccaaaaagaaccacctttggtggttcagtgcagtgtcactatcacctatttgaaatgtagccaggtaacatgtaccattatatttgctttcagtatcacagtctatcttataataagaaacctaggctttctttccattaccataaagagcctattttagccacaaagacaaaaagaaaagtgttttcacatcgcacgctcatggaaataaacaagagtccctgtcttgatgaaagtcttaatgagaaagaataaacattctcaaattttggtgagaaactttggactgaggctggttcaactttggccgcatgtgcaacagaaagagaagggtcaacattgacatagcaatgaatgacttccattgccttagtgtatttttatctcccagaagcaagaaacaagaaaaaatccttctttaacaatatatgttaaatgcagcaggatattggagcatatttttatttgtgtaattctctagatcttgtttaaagggcagataaatttatacgtgtatgaaagttcctttttttcttttttttgaggcagagtcttgctctgtcgccaggctggagtgcagtggtgtgatctcggctcactgcaacctctgcctcctgggttcaagtgattctcctgcctcagcctcctgagtagctgggactacagtcatgtgccaccatgcccagctaatttttctatttttagtagagacggggtttcaacatgttggtcaggatggtctcgatttcttgaccttgcaatctgcccacctcagcctcccgaagtgctgggattacagacgtgagccaccgtacccggcccttgcatttcttctcagtgtgtgcatgttctactcacacccaccattttggtcctgccttgataaatccaaagtcgttatttagataattggctgattggatccacctgggttctgcgaattggcttactgaatttaccttggcttcaggagaatacggagatgacctttgacctacttttttctgaggctttctttggagacctatacacagatgaatattatgtagacgtacccatgtgacttattttgtgagtatatgtttagccacctattttatgtctaatgtatatatgtacagtaagaagccaataaaataaaattcatcagaggtgatttccattatctttacctacaggttaggtaaatccagtcagtcacttagctccgaaaagatttattcaatccaagcaacacaccacgtcactttttttcatacatttaattatttccttgataacctggcacctgggtgtttttaattttgggtttcatcaaaccagctcactgaggttctgttcatctagagaggaactgccagaaatattcactagggggcctagccttcctcacaaagaagatttggcggggcaaataagagccacctatggcgctttagagaatgttcagtattacctatttgttttattgggttttgttgttgttgttgttcttgttgcttttttgttgttgttcttttttttttttttttttttgagacagagtctcgctctgtcgcccaggctggagtgcagtggcgctatcttggctcactgcaagctccgcctcctgggttcacgccattctcctgcctcagcctccggagtagctgggaccacaggtgcccgccaccacgcccggctaattttttgtatttttagtagagatggggtttcaccgtgttagccaggatggtctcgatctcctgacctcgtgatccaccctccttggcctccaaaagtgctgggattacaggcatgagccaccacgcccggcctcttgttgctttttgaggccatcttggttggccacccaggctgaagtgcagtggcacaatcttggttcactgcaacctccaccttctgggttcaagtgattctcctacctcagcctctcaagtagctgagagtgtaagcatgagccaccatgccttgctaattttttttttttttttttgagatggagtcttgctgtctgtcccagtctggagtgtagtggcgtgatctggactcactgcaagctctgcctcccaggttcatgccattctcctgcctcagcctccggagtagctgggactacaggcgcccaccaccatacttggctaattttttgtatttttagtagagacggggtttcaccgtgttagccaggttggtctcgatctcctgaccccatgatctgcccacctcggccttccaaagtgttgggattacaggcgtgagccaccacacccagcctttaggaccccactctcatactcactgtatgtctgtgttattcatatcagccatgttgtgatgtggcttgacaacatcacaaaatgtgatgctttcacttttccaacttagctaattggctgatcatatctatctgggctgagaggattggctgattgattaacctgggtggagctaatcagcttctcgaattcacctggtttacagttgtgaaggaaaataacctcagacctacttttttcctgaagctttttgccagacgtatgcatatatggagtttgtataaacataaccaggggacccattctgtatgtttatccaccaatcttatacctgtatctatatgtattaaaaaagcccccaagaaaaaaataggtcaggactcaacaaaaaatggtatacagaaggcagaattagatcacagcttccactcagacacacagagcagcgtgttgagactcgcatcatgaacttttcctccagaactactgcagaaatataccagaaaagccaagaaaatccacaaaccctctgaaaaaagcagatgctcctgcagggcctgggagactgcccaaatgctgtgaatgcccaagctgtgaaagtaagaaagggggattgtttgccaccaaacacacactttcactgaaaaacctgaaggtctagatcacagaaaaagaatttgaccttacctggagccgaatcaatttagagagctgagcaaaatgcaggagtagaagcagcagccagaaaagacctgtgggctctctaggtcctccagaaaacccagttctgatctattttacaggggtcattggggagggatgccagaggcactgggaaaaggccacaggaagaagaaaacctccagctgaactttgtaacaattccaactggacacgaagtctcctggccagaacatgggaagggtgtgagtccggtgtgcacacatgacaggcggtaaggtgtgaaagtcctgcttactttctcagttggaaggctgggagcctgtggcaagttctcagccctacttacccactgcctggaaacagacttggtgctgttggaggtggcacggtgagagtaagacagaccttttgggttgtacggaagctgggtgaggcctgtaactgctggctttcccccatttctctgactgacaacctgaatgacacagcagaggcagccataatcctcctgggaacataactttgttgacctgaaaaccacacccccactccccatagcagccacagcaagccctgcccaaggagagtctgagctcagatatgcctaaccctgcccccacctgatggtccttccctacccaccttggtagctgaagacaaagagggtatcctcttgggagttatggggccctgcccactgcctgatcctccttttattaccacagctgatgctgttttgaaagcaccaccttttgtcaggagcacaaaaatagtacattaaacaaccaaaattaagaaacatcacagagtccattttactcccctgccacctccactgaagcaggtgctggtatccatggctgagagacctgcagatggttcacatcaaaggactctatgcagacaagccccagtaccagccctcagcctggtagttcttctaagttgctagatccagaaaagaaataacaatcactacagttcagctctaagaaagccacatccctaggaaaagtggcagagtactacatcaaggcaacaccctgtgggacaaaaaaatctgaacagcagtcttgagccccaggtcttgcctctgatattgcctaccaaaatgagaagacaccagaaaaacaactctggtaataggagaaaacgaagttctttaacaccctccaaaagttacactagctcaccaggaatgaattcaaaccaggaagaaatccctgatttacgtgaaaaggaattcagaaggttgattattaagttaatcaaggaggcaccagagaaatgcgaagtccaattttaaaaaatttgaaaagatacaagaaatgaggggagaaatcttcagtgaaatagatagcatacaaaaaacaaatcacgacttcgggaaataaaggacacacttagagaaatgcaaaatgtcctgaaaagtctcagcaataaaattaaacaagcagaacaaagaacttcagagctcgaagacaatgttttcaaatcaacccaatccaacaaaaacaaagaaaagataattttaaaataataaagcctccaagaagtttgggattatgttaaacaaccaaatctgagaataactggctttcctggagaagaagagaaatttaaaagtttggaaaatatttttggtgtaatgatcaaggaaaactttctcagccttgctagagacctagatgtcaaaatacgagaagctcaaagaacatctgggaaattaatcacgatagatcattgcctaggcaaattgaggtttttagttttctagtaaattagccattaaaataatttgttttgttctaatattgttgtattcttctgaaaacaggtacaaacccatagttatacaaacacacttactgcatgtttttacacctcatgtttgtcttcagagtaatatatgtatatatttaatcctacttaaatcaaaactaaaaatctgtaaatttttgcaggcagagtgtccacatgttcaaagaaaaatatgtaacaagtttttaaaaatatttaggtctcagatatgtatggattttatgtatacttgtatataatttttattatgaccgtaaaatgaccctgtagtcaataacaatttaattgtacattttaaaataactagaagtgtagaattgaattgtttctaacttaaagaataaatgctgcctggcgcagtgactcgcgcctgtaatcccagcactttgggaggccgaggcaggcggatcatgaggtcaggagatccaggccatcctggctaacatggtgaaaccccgtctctactaaaaatacaaaaaattagccaggagtggtggcaggcgcctctagtcccagctacttgggaggctgagacaggagaatggcatgaacctgggaggcggagcttgccgtcagctgagattgcgccactgcactccagtctgggtgacagagcgagactctgtctcaaaaaaaggaaaaaaaaaaaaaaaaagaataaatgctggaggtgataatccctcacttaccctgatgtaattatttcatattgtatgcctgtatcaaaatatgccatatatggcataaatatatacatacactatatgcccacaaaattttttaaaaaatttaaataagaaaaaaaataaaaacttaacctatgagaacaatagtctctcacttatttgcagattaaagccactgaaaaaatagattactagagatgttattccactatgttactaaataatatactgttaccatgttttacctacacccttgagtaaggtgggataggttaaagttagtggcataataacacttcattgagtgcacaataaaattaacatgttaaaaaatgttacaaaattaagttcacatataatctaaaaatttttaatataccatattttattacatataagcacaattataatgatatactactaattttatttttaattttaactaaaatttaaaaatgtttttctctcactataatgcacaagaatattacttagaaacctacctcatacactacttaatattataagtcaaccacaaaaagcctcttcacttagattttcatcatgcatcttatattttaatatccttattcttttatggaaaagttcataaataatgcccacttaataaaaataatctctcatatatctgatgcagcaattgatcacatgctttcacatgtgaatacaatagaaacaaagagcagaaaataatttgagagttcaattgcatcattatttgcttttcaaaaagtctgtattttttcaataaaaagtatacttcccatgtaattataactctacaaaaaatctactccttttaaagttatatacaaaaaacttatctaacaattttagtttggaattattttctatactcaacactctgatttagtgtaatgtctgacatttcagtgccttattattactactgtatattctctggtactgacatagacttaattttggataaaatactctatatttactgtatttacaaaaaaaatcttagtatacactctgatgttttctaagctgtagttttttaaaaaatggttttccaaattcattaaatttgcagggtatttctacagtataaatttcctggtgttgaataaagtttgagcaactgccgtagggttttcctctagcacaaaatgtatacaacaagatctgtaatagaattaaaggcactaaaaccctttttatatttgtaatgttcgttcatgttcaaaattaatacactttttttttttttgaggcagagtttcgctcttgttgccaaggctggagtgcagtggcgtgatcttggctcaccgcaacctccacctcctgggttcaagcgattgtactgcttcagcctcgcaagtagctaggattacaggcatgcaccaccatgcccggctaagttttgtatttttagtagagacaggctttctccatgttagtcaggctggtctcgaactcccaagctcaggtgatctgcccgcctcggcctcccaaagcactgggattataggcatgagccaccgcacccagcccaaaataaatactattaaaggtttatatattctgatagatcttttgacagtaattgcattgttaatgctttaagtatgaactccgtgatgttgagtaagatgtgagcagatatgaatggcttttccacattttttatattagtataatttttctcaagaataaatgctttcctgtgcaataagatgtgagcactgagccaggcacggtggctcacgcctgtaatcccagcactttgggaggctgaggcgggcagatcacctgaggtcaggagtttgagaccagcctgaccaacttggagaaaccccatctctattaaaaatacaaaattagctgggtgtgctggtgcatgcctttagtcccagctactcaggaggctgaggcaggagaatcgcttgaacccaggaagcacaagttgcagcgagccaagatcacaccattgcactccagcctgggcaacaagagcgaaactctatctccaaaaaacaaacaaacaaacaaacaaaaagatgtgagcattggttaaactttttgtcgtattctccatacttgaagaagttttctccagtataaattatcttacaatcaagtgtgacaagaatttaaaggctttgtcacattactcacacttctactgtttcttactagtatttcttttatttttagaagtttgaggtgttttcaaaaacattgtcacatctttcagatttgtagagtttctctccagtatggtttgagaacttattaaaagctttgccatattcttcacatttctagaatttctctccaatatgatgtatcctatgtgtaataagggttcaaaagttaaagcctttttcacattcttcgtattcttaggctttatcttctgtataaattctctgatgttcagtaagagttgaagaccaattaaagactttgttacattttttcacatttatagggtttgtctccagtatgaattattttacgttcaataaggtttgaggactgattaaaagcattgccacattcttcacatttgtagggttttctccagtataaattttattatgtctagactacagagctcatggtcagattaacccatatatgagctctccctgccacataaagatgatctttactgaaaaggaacaaattgttcctcaactgaaaaaggacattacccacaaaaaaaaggtgtcccagaagaaactgaagaaacacaaacttatggcctgtgagtaaattcagcattaaaataaatgcaattaaaaaaagaataacaacaaaaatatttaaaatatcaataaaccctagaaattatggaggtaaaaatacaaagtgaaataactgaaaatttttaaaagtaataaaatgtgatgtaaaaatgaagaagctcaacaaacaaactaggatgcacacaaagatatttctttcttttttttttttgagacccagttttgcccttattttccaggctggagtgcagtggtgcaatcttggctcaccacaacgtccgcctcctgggttaaagcgattctcctgcctcagccttcttgagtagctgggattacaggcatgcaccaccacacccggctaatttttatatattttttttagcagagacgaggtttctccaggttggtcagctggtttcaaactcccgacctcagatgatcagcccgcctcacctcccaacgtgctgggattacaggtgtgacccactgcacctggccacacaaagatatttctaacaaacatatatatataggcacaatttttaaagtcacagacaattagagaatcttgagagcttcaaggcaaaagtgatgtgtcatttaaaagcatagtctaatgagataaccagtaaatttgtcgacaaaattttgcaggttaggaggaaactgtgtgatgtagtcaaagtcctaaagaaaatagttgtcaagtgagaataatgctatcagcaaaactgtcctaacaaataaaaagaaaaagaccttgcaaagtaaccaaattcggaaaaagtatattggcatttcatatgccctacatattaaagatgctgaaatgagttccttccactgaaaagaacatgatgaaggagaacaacacataattttataaaaatacataactttctaaaaaacttacacacatacacaaaacagaattccttagcattatcaaaatggtggaaaaagcacttttagtgtctaaaatttgaaacataaaagcatagaaattatggtaaacacctgttaatgaatatgcaacataaaaagataattagcaacattaataacaaggtttagggcacatgtaatgaggaagaaattttacaggcaactaaagttaattttttaccagattaaaatatattgttgtatcttttaaaggttttatgtaatctccaaagtaccatagaaaaaacctgtatagactacagcctgtagctggtactacaggcacatgccacccgcccggctaattttttttttttttctgtatttttagtagagacacggtttcaccatgttagccaggaaggtctcaatctcctgacctcgtgatccacccaccttggcctcccaaagttctgggattacagatgtaagccactgtgccctgccaacaataatacaataatagatttatgcactgggaacctatgacaaatttgtacataagtttgtgtgtgtgtgtatctcatattagggttctgaatatataaagcaaatattgaaagaattgaagaaacacatagagagcaacataattatagtgagatatttctataccttgtgttcaataataaaaataagacaaagcagaatattagtaagggaacattagatttgcaggcagtataaaacaatgattcctaagaaaggtatagagaatactcctcaacagcataggacacacaccctttgcagtagctcataacattctctttgatagatcaccagttaggtcaaaaaagaagtcttaacacatttttaaaactaaaattgtgtggattacttcttataaccaaaattgaataagaatatataaacaacagaagaaacctgaaaaattcacaaatatctacaaattaaacaatacactcttgagcatgctcttggtgaaaagttgaaataattaatattgtgaagatgtttatactgcccaatgtaatctacagatttaatgcaatgtttttaaaatttctcattgcatttttaaagagacaaaaacagcaaatgcaaaagtatatgaaattgcaagagacaataatgtaccaaaaaatatttttaaaaaaacaaatcggaggcattacagttcctgatttcaaaaaacattataaagctaaagaattaaaacaatttgaatgagtgtaaaggtaaaaaaaagtagactaataaaataaaatgcaacacatacataaattttcacatatatggtaatctgaacagttatttgcatacccatagttattgaagcattgttattgtaagccaataggcaaaagcaatgcaaatttctgtcaccaaatcattcagtagagacaattagaaagataaatacattgaaaattcactcagttttcaaaaataaggaaatattctaacaaatataaacaaatataacagatctctgtgactatgtctagttagttctcaggaccagttaaaagctttgttttttataacaaatctctggcccagcacccaggtgatgtgactctcgtgcttgctacctacacaaatgtggatttgttacatatatactgtcccatctcacaagtaatatgatgactttcatatcttgaaccagccagttgctgagatactgtctcccaaggctaggcttagggatatgggtgtgatcgtgggtctcctatttttctgcaggtcagaggggattaccacactctcacatatggtataaagccattgaattgtacacaatgtgtcaccacagagcccagcctacaggtgaagttgacttgcacatatgcacaacccatcaaccattaaaattgtaaccctcacagatggatagacctcacttgtgaatcttacacatggatgcagttcacagttggatttgtgactgtcatatgtgagcatctggccagatttgtgatggcgaaacatctttaaatgcagcttataagaagatgagggctctcctatctggacccagaacattggagagatgttgcctctcctacctaggtttagggacacagatacaatcataggttcataccagcaagaaagtctcagactagattgtgactctcattcaaactgtataaagccctagacccaacacctaggtaatgtgagtcttctcttttacctgggcctctcatattttgagtattgtgacatattgctaggcccaacacctagggtatgggaggctcttgcctaaaacttactcacagaaagccttgtgacatatctctgcatacattacctaggagatgactttctcctgcttgcaccctacccataggagaaattgtgacatattactaggagcagcacccaggtgatgtgactttcctgcctggtctctgtcctcagggaatgttgagaaatatctctagatccaaacccacatgatgtgactctcctgcatgcttcctatccacaggtggaattgtgacatatgtctttactcaggtaacagatgtgatgatgaccctcattcctcaaacctgccaataagagaaatactgtcttttgtaggtagacttagaaaaatgggtaagatccttgggtctcctctttgtacaaagatcatggaggcttatcactctattgcatgtaccataaagcactcagcttgtactgagagtgtcaccacagagaacagcacacaattgaggttgtgctttacatatttacactgtggcagtcattaagatcatcaccctcacacatagaccgagcccactgaggaggtcctgaatcccaaatgcagacacaatctacagttgcaattgtgacagaacattcagcctctgttaagatagtgattcattcctaaacccaaatcataggtaggtaaagactgttctatctggaacccaccaataggagagatgttgaccctcatacctgggcttaaagccacaggtaaaaatcacaaatccatactagtatgaaggtttcagaatagattgtgactctcgtgcataccacataatacccttgtgtggtacagagagtgtcctaacagggcccaggagtcagatgagattgtaatacgtgtgtgcacatccagctgatagtaaaaattgtcatcctcccacatgaacacagccctcttttgaagttcttaatttcataccctgtggcagtggaaagttggaaaattgactatcatccatggatccaatccacaagtgggttggttaatctcagacattcagcacacaggtgaggctgtgaatcctcaaagaggacacagtttgcaggagggattgaggctgtcatgtatggacccactctctcattgagattgcgtgactcctgtttttagagccaacatacaggaggtgttgactctcgtaaataaaacctagacatgttcaagattgtcaatcacatccctggaccttcctaggtgtgattgtgacataagcctctgcccgggaccttaataatttgactctcttgcttggggtcagacaacagataaaaacatgacacatccatggacccagcacctaggtgatgtgactttattcttttgctgtggctccacccatagagagcattttcacatatcaaagtgctctgtagacaggttatgtgactcttttgcctgtgtccagacaacattggccactgtgacatattgcagggtccaacacccaaaggaagtaactcttatgactgggttctatctacagagggcactgttacatatttctgtgctcatcactcagttgatgtgactctcctcttctgcctgggccatgccttcaggagagtgggagatagggagagtgacttattgctaggcccagaacacaggtgatgtaatacttcttcctggtctctttccacaggagttactatgatatatcattaggcccattacctagatgatgtgatactcctgtttttttctgcaacttgtgcacagtgtggattgtgaacttggcttagcacctacatggtgtgactctcttctcatgactaggtcttatcactgggttggttgtgacatagagctgggcccagtcactaggttatgtgactctcctctttttcctgagccctacccacaagaggacatatttctgggccattcatcttggtgatgtgaatctacttcctgggacctcccctcaagggatattatgaaatattgctggacccagcacctagtgatatgactctctgcttttgcgtgggcactgcatacatgtgtaatatatagctaggttaaacacctgggtgatgtgactttcctgcataagctctgttcacaggaatgttatcacatatcattttgttcatcacctaggtgatgcgactctactcttttcctgagccctgcaaaaaggagagattgtgacatatcactgaactgagcaccttggtgatgtgactatcctctcttgctcaagtgtcacatattattggtattgtgacatacctctgtgaccaacacctatgggtaggaaaacttccacccagactcagcccaaggggccctcatcacttttttaaaagatatgtgacttgaaaaatgtgactgtcttctgcttataccctgccctcagggaagattgtggcatattactgaactaagcaacctagtgatgtgtctcttctgactggggtttgcccacagagacaattgtgacatatcactgggccctaggtgatgtgactctgctgcctgttcccaacattcaagagaggattgtaaatcttcctggccaagaattcaggagatttgactctcctttcttgtccctgccctcaaagaagattatgacgtatcttcagccccaaacccaggtaatgtgacttccctgtttactctctcttcaggggagaaattattacatatatcctggcccagctcacaggtgtgatgacagttctcatacctcaaacaagtcagtagaagcgatactgtttcttatagctaggcttaggaaaacttataaaatacctgtgtctcctctttatatgacggtcatagagaactaccatgcacttgtatatggtataaagctcttgagtggtacagagagtgttcacatgtcccaaaacaaaagggatattgtgtttcttgtatacacacccagacacctgttaggattgtcaccctaacacctggaaacagcccattggtgaggtcttgtgtctcacatgcagatgcaatccacagtttgattcctgactgtcaaatgtaaacacctgtccaaagttgggatggtgactcatttctagacccagctcatagacaagtgaggactcttctgtctgggcccaattaatttgagaaatattaacttttctacctgggcctagggagcagcataaaggtctcagggaaaattgtgactctcattcctagtctacgatgatcttgggtagtattaaatgtcctaacggggttcagcgcacaggtgagattgtgacagtgatatccacacccaactgacagtaaaacttgccatctttcctcatggatacagcccactgttgaggtgttgaatctcataaccaaaggcagttgaaaattaaaacattgtctctcattggtagacccagtccacaggggggttggtgactctcagaccaaaattcagcacagttatgaggccatcactccactaagaaaacggaattcatagaaaaaattgagacgctcatgcacaaatccagcccaccactgagattgtgactcatttgcttagacccaaaatataggaagcgttgactcttatacctagaattgggacatgtgtaagattgttcatcttttcctcagactttcctgcaggagtgatgctgacatgttcctctatttggcatctgagtgatatgactcttgccatggtctagcccacagatggaattgtgatgggttgctctacccagcacctaggtgatgtgactccatttttctgcctcggcactgtccacaaaaggtattttgacatatctctggggtatatacccaggttacatgactctcctgcctgtgcccttttcacatattatcataaaatattgctgggtccaacacccaggtgatgtaactctcatgcctaggacctgccaacagggggaattgtgacaaatctctgtgccaataacccaggttatgtgactctctttttttgcctggtccctgctcacagggggcattatgacatattgctgaactcagcacctaactgatgtgattctcctttctagtttttgtccacaggggagattgtgacatatcactgggcctcaaactaaggtgacgttacactttcatttttgaactgtactcagaaggcattgtgatatattcctgggaacagcaccaaggttatgtgagtctcctgcctgcactttgcccacaaagggcattgtaacatatatttagacctatcaactattcgatgtgacttcttttcttaacgtgtaagcaagttgccccaaccatggagggggtcgcggtggtgacggcgggcagcgtaagcgctgccaaagccgagggagctgcagccttgccgcctccgcctcctgtctccccgcccgccctcaccctcgcacccgcagcgggtgaggagggaccggcgcctctgtctgagactggggctcccggctgctccggctcccggccccctgagctggagccagagcgcagcctgggccgcttcagaggccgcttcgaggataaggacgagcagttggaagaagaagaggagctagaggaggaagaagaggaggaggaggaggaggacatgagtcacttctcgttgaggctggagggaggccggcaagactcggaggacgaggaggagcgcctgattaatctctctgagctgaccccatatatcttgtgttccatttgcaaaggttacttaatagatgcaactaccatcacagaatatctttataccttttgtaaaagctgcgtcgtaagacatttttactacagcaacagatgtccaaaatgcaatatagcagtacatcagacacaacctctttataaggttggaccgacagttacaagacatagtgtacaaattagtgatcaatctagaggaaagagaaaaaaagcaaatgcatgatttctatcaagaaagaggtctagaagtacctaaacctgctgttccacagccagtcccttcaagcaaaggaagatctaaaaaaatccgagaatcagtgtttcctattccacctgaacttgatatgtctttattactggagttcattggtgctaatgaaggcacgggacattttaagccattggaaaagaagtttgttcgagtttcaggagaagcaactattggacatgtagaaaaattcttcagaagaaaaatgggtcttgatccagcttgtcaggtagatatcatctgtggtgatcacctgttggagcagtatcaaactctaagggaaatccgacgtgcaataggtgatgcagcaatgcaggatggtctgcttgtccttcattatggtcttgtagtttctcctctgaagataacttgaagattctaggcacattatgaggagggaaacaaaggaggcttctgcaggactgcatctcaccaaagatttccatgaaatgtaattgctaccactttgctgttcaagacataacttacctatttttagcaccaagaattatagcatttataagtacaacttggaacgatggaatgcatctgttactagagactgtatataaaaagcagcgaaagctcaggggaaatttttcaaaaattgaattttaaaatttcttatgattttaaataccttgacattgattttgcttcccatctttgaagtaattggttagttttctttgttcagccatttcaagttggtggttgggatatctgctctctgggatggcatcagttgggcagtcatccttttggaagagaagtgtgcttttgaatggaagatccaaagccagtctttgttaaactgcagggcgtactctcaaagaccaaaactattggccacttttgtatgttgccagcatattttgaacttgtatctttttttatactagcaacactacaaaggagaagttactcatttcaaaatggatgaattgttattatgtgtgaagagactctgagtttatggtctgtgccataaactttcagtgtaataagacttcttcaatacatcttccaataaggggtgcttctttgtgacagtatttttatttctgacattcattttatttgggtacatagtgtggttgttgataccttgcaaaagtattgcttctgaaagtaataaaaaattttaggagaatttgagaagtttacagaattacttattcattgttttcttggtaagtcagtttaatgtttatttttctcattatttcatcactggaataaagaataagggtgtttgagctcacctccatgcaaagacttcagttttaaaacattattttgcctaaaattagcattgtgatgctctctaaaagaaatattttataaaccctgttcacagcagaatttctgaatctgtatagagactactacaaaattggacaaagattggcaattctttgtaaagaatttgtgaactgtgtataaatttattctaacatttaataaaaatgtatttaaacctaaaaaaagaaaagaaaagaaaaactgaaaactcgattgggtcagatatgtcatttctattctatactttttttctggaagtagttccttcctctcctgatgcagagggaggctggctgggggatcctgggcccctctgtcctccccgcggtggcagtggctgatctctgctcaggtgtgaggggtgtggccatgtgctgggcttgagcctgcccggcccagcccctcctcacttccctggactcttcacggtgtccacaggcccttacacaatcttgagcatccctctgatggaaggggaggtggcagcagaaagccagtgggagaaactggccccacaggtcaaggagggcttgcccagctgtgggaaatgctttggttgacctcggatttctgtgcgccaagctgagccccaatcctggctttgagtccaggtgtcctcgggctgggcgaccttggccgtgggcgctctggctgctgcggtggttcctgctgtgctcggctggatcacaactggaactggtgccctccagaagtgaaggaggtgccccgcaggtgggaggaggcagtagccatggtccctgtaaaccaggccttgctgacaaatctcagatgccaagaacagaagaacggagagcttctgccaaatgaacaaactgttggagcgactgagtgtgaagctgcccaaactcctcaaagtggagcagtgaagcaaacaccagagaaggacaagaaaaatgaaagtcaaagaaaatgagcagaaaccaaaggcagatgctaatgcagtgcaaagcagttcacaccatgatagaaagagttgatgagtctcggaaactaatcttagtgacagagtgaaaggacagcagtgaacatggtaaggtgctgacgattctggtccactggatcccaccatccctaggacagtaaataccatcacagtcaccacacagcgagttacaactgcaccatttcctgtttattcctaaatgaataaaggtgattctcatcacaagtgcaaataaaaagttatttatcttttttttaaactaaagtgtcttgctttagcttttttttttttttttagttcttataattttgaaaatgaagttgacatttgtatggcttatgaaattttcaatagtcttgcattagttgaattgttcaaagtaaatatattttaaactaagaagagtaaactgtgtgtatttgttttacatagtaaaggctgaaagtaacaaatattatctgtttatgatttgaaaatttcaaagtttgattatttatccatacatacacagaatagtgtatcgtgctgaaacatttgtgttttaaagtggcagccatagttcctgcctgtctggatatattttggacttttgtatgttaaatacaacgtaaaaagactttattgtgctttagaaaatctaaggttggtatacacaaacaaactttacaaattactgtagggttcagcaaactgtgtttataatgtgacattaatacctctacattttgatgtgtaaatctttcttgagaaaagattgttttttaaaaaaatggctacaaattcaggcttcagttataaaatgacaaaatagtaaagaaatgagtggtttgccatactatatgaatactggcattcaattaaaataccaaatatgttaatgaaaaacttttagacaatagatttaaataatttcttgatattttactacagtaataaatattcacaaatattttataagtcatatctattagtactaggttttacttaatagtagtatatatataagatcaaaaatctgttaaaaatagatatgcttatcaataatttggtgtttctaaatacccagaagtcttgttttaatcagattagctctggggatagtttactaatttcattttatatatggtgtgttcaaagttttgtagttaaacctaatattgattgatgatgggtaaacaaatctttttttgctaattccataggtttattaaattgttgaagatgttgttaattaaaaaattccaactttcaatgttgtttacagggatttaggtctagtttaatctgctcaacctgttaatcagtgtcaggtgccggattccaatttattttcagtgcgtttgtatgacttttgtttttttttctttctttttttcagacagagtctcgcactctcatctgggctggaatgcaatggtgcaatcttggctcactgcaacctccacctcctgggttcatgcaattctcctgcctcaggctccccagtagctgggattacaggtgcacaccaccacacccagctaattttttgtatttttagtagagatggggtttcactatgttggccagactggtctcaaaatcctgaccttgtgatctacccccttcagcctcccaaagtgctgggattacaggtgtgaaccaccacacctggccaacttttctttctttagtctttgaataaaacgtctattaacaaagacaaatttctacacatttatcaagttccttttagtaactcaaaaggtaatatatccaaaattctcatgttattgtctgagaaaacagattctactgttaccaaaaaatcaactggaaggcatttttataaccttgcaccacataagaaaaaaactgtaatgcagtagtaataagtgaagatacatcaaatgaaaaatggtaattgagaaagtcactttcaatgtttgagtatttggactttttgtttaaaaaaattgtagtaaaatagagcttttggtaagctttctatagattaacattatcataaattaggaaaaaaacctttaaattgtaaataaacaaacaaaaaaacaacaacaaaaaacaacaacaaaaaactaagatccaggactgcatacatattgatccttattttgggagattatgaaacagaccattgcatgaactttatatagataccttgccacatgggcatactaataaaaatcattatatttaatttgaatgaacatgtccacatcttaaaaatactgctttgtactatgaatgataaatgtaaaagtttttatacacaagaggatcctgattcttaactgaacatatatggcaacccatttctatgtttcttctgaactgaagcctgattaaggcttaaatgtggaatgagagggactcaataacaggacatgtggaacaaaaacaaaaaaatgagataggttggtcatttctaagttcaaattattaaataaaatattaaattcttgtcctaagtttttttctttcaaaaacaaacttgaaaactgttctaatccagttttctttcatgaagggcctactcattgtgtggaactgaaaggaggtcctagggctactgaaggttcctggctgagtctatacctcaatgttacctaaaagcccttggactaactccagtcctcaacagccaatgagggtgttggcacaagaacttccagtctttttttatttcatttcatttcatttcatttctcttgttcttgttctttttttttttttcatggctatcatttctcctatccgttctttgtatgcaaagttgtgaatgtttttacagcctatggatataatcgtgctgagtaaagtcagtcagtgtcttggtaatcaaatatgtaactcaaaggtgttgttttataatttcctagcaacagagtgaattcaaaatctctctaaatttttacttagtaaaggtctttctctcccccagtaataaacattcatggcactgtatgagagaatatttcactctgagttaataccctcctttgcatttcgttttttccctccatgtgaaagctgagcactgtccaatgtatctaaacagttcctatatgagacaagttcattttttttgttctggggcatatgctataggaacagcctatcaaaccccaaacctctttctaacttttgcctaaaaatataaagttggagtttttacctagcatttctaattttacagcacccctagtggaatgggattgttctccatgtgaagacttgccaacactctgtccaaaacttacagttccccaattattttcccttttacatccctttatcagtgataagtcctcatgccctatttgtaaacagaaaaactcagctttcaacagccagaagaaaggctttctaacaaaacaaatcttcaatttttacacatttttaaggcacctgttcttcatcaaactacattgaaatttaaacagaaaggaattttatgtttgaaagtaaactcgtcccattctctgggattctgatgttttcctggggccgtagtaagggaagccaaaaatggcattagggcattccctctaaaaaagtatcttgcctaaatccaactactgcataatctctccccagccactggagtaccttgagagccttttgcgctgagtgggtctagaaaaccagcaggatggaaagctagggtcttgagaaggtgagcacaatctgtcctgcctatgaactcctccggaaccatgggtaaaggtcatgcttccatccatgggtaacatctatgatggttgctgggacacagaggaaaaaaaggaaggttgagaagtggtatgtcctttttctctttccttccaccctaggccacactgaaaagagaaaggggactgaggaacgccttgtctcccctctttctctagataggtaacaaaccatcgacagtctgcattcccctctagtgcattctgaaacactggaacttctttaaccctgaaattctaaagaaaaagtggcttatattctattgcataaacccatggccatcttagagacagtaggcctggctttctaagggaagcattaatttcaacactgtccaacaaatagatctttctttgccctgtgagacaacccagatctttgtaagcattgtaaaattaaatctgccttcttggcagccatatcagacaagtctacaacatataattaccaaaagttgagatacaaacccttggggaacactcaaatgtaacttccaggtgccccagcagcctcacatattttgggcccccaatacccatatatcatcagctcctctggttgtgccactgaagaaacccacaacattgctgttaccccctacagaaaatgcccagtagacatggtgttactagtattcaagttcccttctagttgcaggaccttaagaaaataaagtgaaccccaggcaagttctctaatgacactgactcatatatagaggctttccaaaatttaacccaagtgtttaatgttacatggagagatgctatgctgcttttaagccaaaccctaactgttaagaaacaggcagccttacaggcagcaaaaaaaaaaaaaaaaaaaaaaaaaaaaaaaaaaaaaaaaaaaaaaactcaaaaacaaacagtaggtttcctagagccagtcagaaaagaaacccagtcaaaagggaaaaaaaagagacataatccgcattcccaataagaataaaaacaatgccccttaaatattctaatgggagcccttgtgatcttatagagaagtggaaaagaaaacactttctgatgtgcatattagaaagtttgcaaagaaccacaatcaagcatattaattactctaacctctccttgttaaatcagaaaccagataaaaatcccatggcctttttgaaaaggctgagaaaaactttagtaaaacaaacctccctgtgttgtgattcaggaaaaaaggtttattacttaggcagtctctaatatcagaaggaagctgctaaaacaggccctgttcaaacacctttctaggttttgtcatcctcaagttgaaactttgcagtatttaaataacactgttctctctgcctcaactgaagaggtctcaggaaggcactaaggctttcctcaatttattagctgaaaggaaatatagggtctcaaaatttaaagctcagctctgtcaaactgcagtaaagtagataggtctagtcagaaggtacaagaacaccaggtaaagaaagaattaaacttattttctccttttcctttccaaaaactcttaaacagttgggagggatcttagacattactggatttttgcaaattctgggtatttgggaatggtgaaatagttaatcttttataccaccttacaaaaactcaagcacctaaagactcacttggtaacttgggaatctaaaactaagaagcctttaaccaactaaaggcagccttacttaaagcaccaacccttaatcttcccataaggaaagcatttaatctctatgtatcaaaaaggaagttaatgaccctgggagttttaactaaggctcaaggtccaggtcaacaaccagtgggttacctaagcaagaaacttgacttgatggctagaggatggccagcttgcctcttaccagttttggtggtggcttgctggtacgaaatgccatgaagttaacaatgggaaataacttaactgtctgcattcccacataggactgctgtcctctaatgcaaacctctggctaataatcacctcctcaaatatcaagctttgctgctaaagtgatctgcagtccagttaaaaatttgcctttgcctgaacccagccactttctcccagaggaaactaaagagcctaaacgggattgtaaacagctagtggtgtaaactggtaaaagaaataagaagaatcactgtttatattctttgtaaagttttaattaattaaataaacatttttaaaatgtactcaacttaatgaaaagtgaatatccaagctataagtatattcaaaaagcctttctatttttatctttataaaacttgttttcctggaagagggttttatctcacttaactgaattacttttatccactctttcttgtcactgttgatgcaagcatagaaggccctaaaataacctctggtggcctaagactcctcaggaaaacaaaaaagccaccacaaattacattttaaaagaaatctctgctttttttaatgaaactcctagaattaaaagtaaataagtccctctcaaaatctctttttcttctagctatgcttatttgttaggccctggaaactgtattcctagccctgtcctttttttttttatgggggacagagtctcactctgtcacctaggccagagtgcaacagtgcaatcttgtctcactacaacctccacctcctgggttcaagcaattatcctgcctcagcctagtgagtagctgtgattgcaggcacctgccaccatgcccagctaaatttttttatttttagtagagatgtgttttcaccatgttggccaggctggtctcaaactcctgaccgcaggtgatccacccacctcggcctcacaaagtgctgggattacaggcgtgagccaccatgcctggcccctaaccctgttcttaaatggcctcaaatagagaccaataatccaattagaaaattggcaaacaaaaaatcttatagttactgaattttcttctgtttgtttagatggttatatacgtgttttgtgtgaagtctataaaaaacctctaattaattggtgtgcaaataagcacttcaaaaaaaattaagacaaaattaaggctgtagtgcctcttggttcatgtaactttaatatttaagaaataaaaacattcttgtaaaatacaaacgtcttaaaatgtaaacaggtggtctaaattatgcaggtcaaatactaggtttgttaaatgttttaatgttgtaaactgcttctttggcctttaagtactgtcaacctgccagcttcacaattagtaaggcctggtgacatataaaagtaaccatgcccctaactatactggaagaagtcagactttatctgctcctagcacataattaaaacaacttaccaggttttacattaaagttaaaattacaaaaagttaccattgtaacatgtaattgagactattaaaaatggatttgcatgaaatgtgtgtaaaatcagtaaaattttttaataaaaaattataagaaggcataaaaatctacatttttctcaggagtgaaagattgtcttaaattaaataaagtgaaagttttaagcaaatttttaaaatactgtaaaaattaattttgcaaaagaaaactgtaaatatatgaactaaattcaaaggaataacatatggtgttcctttaaattaagcatttaaatgaaagcacaacaagactttcttaagatgctaatctgctctgtatcaaaatttctaaaagattataaaagatttgtaaacatcaaagatccattccaagatgggcaaataggaagagatctggtctgcagatcccaacgtgatcaaggaagaagatgggtgatttctgcatttccaactgaggtacctggctgatctcatttggactggttggacagagggtgcagcccacagggggcaagccaaagcagggcaggacatcacctcacctgggaagaacaaggggttggggaatttccctttcctagccaggggaagctgggacagactgtacttggaaaaatgagacactcccacccaaatactgcacttttcccaaggttgcagcaaccagcagagaagaatattctctcctgtgcctggctcagcaggtcctgcagtcacagagtcttgctcactgctagcacagcagtctgaggtcaaaggtgacacagcagtctggttgggggaagggtttctgcctctgctgaggcttgagtagctaaacaaagtagctgggaagcttgaactgggtggagcccactgcagctcagcaaggcctactgcctctatagactccaactttgtgggcagggcatatctgaacaaaaggcagcagacagcttctgcagacttaaaagttcctgtctgacagctctgaagagagcagtggttcccccagcatggggtttgagctctaagaatggacagactgccacctgaagtcaatccatgacccctatgtagcctaactgggagacaccccccagtaagggccgacagacacctcatataggtgggtgcccttctgggacaaagcttccagaggaaggatcaggcagcaatatttgctgttctgcaataattgccattctgcagcctccactggtgacacccaggcaaacaggttgtggagtggacctccagcaaattccaacagacctgcagctgagaaacctgactgtcagaaagaaaaccagcaaacagaaaggaatagaagcaacatcaacaaaaaggacatatacaccaaaaccccatctgtaggtcaccaacttcaaagaccaaatgtagataaaaccacaaaggtggggagaaaccagagcagaaaagctgaaaattctaaaaaccagggcacctcttctcgtccaaaggatcacagctcctcaccagcaatggaacaaagctggatggagaatggctttgaagagttgacagaagtaggcttcagaaggtcggtaataacaaacttctctgagctaaaggagcatgtacaaactcatcacaaggaagctaaaaaccttaaagaaagggtagacgaatggctaactagaataaacagtgaagagaagaccttaaatgacctgatggagctgaaaaccatggcacgagaacttagtgatgcatgcacaagcttcaatagctgattcaatcaagtggaagaaagggtatcagtgattgaagatcaaaataatgacataaggtgagaagacaaggttagagaaaaaggagtagaaagaaatgaacaaagcctccaagaaatatgggactatgtgaaaagaccaaatctatgtttgataggtgtacctgaaagtgatggggagaatggaaccaagttggaaaacactcttcaggatattatccaggagaatttccccaacctagcaaactgggccaacattcaaattcaggaaatacaagagaacaccacaaagatactccttgagaagaacaaccccaagacaaataattttcagattcaccatggttgaaatgaaggaaaaatgttaagggtagccagagagaaaggtcagcttacccacaaagggaagcccatcagactagcagcagatgtctcagcagaaatcctgcaagccagaagagagtgggggccaatattcaacaatcttaaagaaaagaattttcaacccagaatttcatatccagcaaaactaagcttcataagtgaaggagaaataaaatcctttacagacaaggaaatactgagagattttgtcacgaccaggcctgcttacaagagctcctgaaggaagtactaaaaatggaaagaaacaacctgtaccagccactgcaaaaaacatgtcaaattgcaaagaccatcgatgctatgaagaaaccgtcaattagcaggcaaaataaccagctaacttcataattacaggatcaaattcacacataacaatattaaccttaaatgtaaaagggctaaatgaccaattaaaagacacagaccagcaaattggataaagagtcaagacccatcagtgtgctgcattcagaagaccgatctcacatccagagacacacataggctcaaaataaagggatggaggaagatctaccaagcaaatggaaaacaaaaaaaagcaggggttgcaatcctagtctctgataaaacagactttaaaccagcaaagatcaaaaaagacaaagaaggccattacacaatggtaaagggatcaatgcaacaagaaggttaactatcctaaatatatatgcacccaatacaggagcacccggattcataaagcaagtcaccagagacctacaaagagacttagactcccacacaataataatgggagactttaacaccccatggtcaacatcagacagatgaacgagacagaaggttaacaacgatatccaagagttgaactcagctctgcaccaagctgacctaatagacatctacaaaactctcaacaccaagtcaataaaatatacattcctctgagcacaacatcacacttattctaaaattgacaacataattggaagtaaagcactcctcaacaaatgtaaaagaacagaaatcacagtaaactgtctcttagaccacagtgcaatcaaataagaactcaggattaagaaactcactcaaaactgcacaactacatggaaactgaacaacctgctcctgaatgaccactaggtaaataatgaaatgaaggcagaaataaagatgttctttgaaaccaatgagaacaaagacacaacataacagaatctctgggacacatttaaagcagtgggtagagggaaatgtatagcactaaatgcccacaagagaaagcaggaaagatctaaaattgacaccctaacatcacaattaaaagaaatagagaggcaagagcaaacacattcaaaagctaacagaagacaagaaataactaagatcagagcagaactgaaggagatagagatgcaaaaaacccttcaaaaaatcattgaatccaggaggtggttttttgaaaagatcaacaaaattgatagactattagcaagactaataaagaagaagagggaagaatcaaatagatgcaataaaaaatgataacggggatatcaccacttatcccacagacatacaaactaccatcagagaatattataaacacctctatgcaaataaactagaaaatctagaagaaatggataaattcctggacacataaaccctcccaagactaaaccaggaataagttgaatctctgaatagaccaataacaggttctgaaattgaggaaataattaataggctaccaacaaaaaaagtccaggaccagatggattcacagctgaattctaccagaggtacaaagaggaggtggtaacatttcttctgatactattccaatcaataaaaaaagacagaatcctccctaactcattttatgaggccagcatcatcccgataccaaagcttggcagaaacacaacaaaagagaattttagaccaatatccctgatgaacattgatgcaaaattcctcaataaaatactggcaaaccaaatccagcagcaaatcaaaatgtttatccttgacaatcaagttagcttcatccctggaatgcaaggctggttcaacatatgcaaatcaataaacgtcatccatcatataaacagaaccaacgacaaaaaccacatgattgtctcaatagatgcagaaaaggcctttgacaaaattcaacagcccttcatgcaaaaactctcaatcacctaggtattcaaggaatgtttctcaaaataataagagctgtttatgacagaaccacagccaatatcatactgaatgggcaaaaactggaagcattccctttgaaaactggcacaggacagggatgtcctctctcaccattcctattcatcttagtgttgaaagttctgggcaatcaggcaagagaaagaaataaggcgtattcaattaggaaaacaggaagtcaaattgtccctgtttgcagatgacatgattgtatatttagaaaacctcatcatctcagccccatgtctccttaaggtgataagcaacttcagcaaagtctcaggatacaaaatttttcaatgtaaaaaatcacaagcattcctatacacaaataacagacaaacagagagccaaatcatgagtgaactcccattcacaattgctgcaaagagaataaaatacctaggaatacaaattccaaggaatgtgaaggacctcttcaaggagagctacaaaccactgctcaatgaaataaaagaggacacaaacaaatggaagtacattccatgctcctggatgggaagaatcaatattgtgaaaatggccatactgcccaaggtaatttatagattcaatggcatccccatcaagctacctctgactttcttcacagaattggaaaaaaactactttaaagttcatatggaaccaaaaaagagccctcattgccaagacaatcctaaccaaaaagaacaaagctgaaggcatcacactacctgacttcagactatactacaaggctacaataaccaaaacagcatggtactcataccaaaacagagatatagaccaatggaacagaacagtggcctcagaaataacaccacacatctacaatcatctgatatttgacagacctgacaaaaacaagaaatgaagaaaggattccctatttaataaatggtgctgggaaaactggctagccatatgtagaaagctgaaactggatcccttccttacaccttatacaaaaattaattcaagatgatttaaagatttaaatgttagacctaaaaccataaaaaccctagaagaaaacctagacaataccactcaggacataggcatgggcaaggacttcatgactaaaacactaaaagcaatggcaacaaaagccaaaatcgacaaataagatctaactaaactaaagagcttctgcacagcaaaagaaaataccatcagagtgaaaaggcaacctaaagaatgagagaaaaattttgaaatctacccatctgacaaagggctaatatctagaatctacaaagaaatcaaacaaatttacaagaaaaaaacaaacaaccccatcaaaaagtgggcaaaggatatgacagacacttctcaaaagaagacatttatgcagccagcaagcacatgaaaaaatgctcctcatcacttgtcatcatagcaatggaaatcaaaaccacagtgagataccatcttatgccaattagaatggtgatcaaaaaagtcaggaaacaagattctggagagaatgtggagaaataggaacacttttacactgttggtgggagtgtaaattaattcaaccattgtggaagacagtgcagcgattcctcaaggatctagaactagaaataccatttgacccagcaatcccattactggatatatacccaaaaaattataaatcatgctgctataaagacacatgcacacgtatgtttattgcagcactactcacaatagaaaagacctgtactcaacccaaatgtccatcaatgataaactggattgagaaaatgtggcacatatacaccatggaatactatgcagccataaaaaagtatgagttcacgtcctttgcagggacatagatgaagctggaaaccataattctcagcaatctatcacaaagacagaaaaccaagcatcatatgttttcactcataggtgggaattgaacaatgacaacacttggacacagtgtggagaacatcacacactggggcctgtcgtggggtgggtgccaaggggagggatagcatgaggagatatacctaatgtaaatgacaagttgatgggtgcagcaaaccaacatggcacatgtatcaaacctgcatactgtgcacaagtaccctagaacttaaagtataataataaaaaaaatttgtaaaaatctcacttcatgtttaaactggttaagattaaatagaattatctataaggtttcattaaaattggggttaacattaatagtaaactaatgcaaggggaaaatttggctttttctttttaacaggatttttatgtagtagtaagggccaataaaagatttttgctttttcaaatttttaattcttcatgttggcaaaacaaatagcttatggtaatctaaaattctattccttaagattaactgttttagacctctaacatatttaagaaggtccccaaaatcaaacttcagtctcaaaggttgtctttcctgatgcatggctttttggtgctacaaagagcccctaaagcattcaaaagaaaggcaaacagaattattgaacatgtttaggtacatgggattgtcaaaatgatgtcttttttttcagtttatatttaagtatataatattgacatatgttccaaaactatatggggtgtctaaggttctaatgtctaaatatgtgctaccaatcaaaattaaggttgttatgttgggttattgtaaactacaaagataaccaaatttttttgtcagtcgtgtttctaactgtaaccctggatattttgtcattggcagacaattttcttgttttaatcctcttaaaaatggtttataatcagctgtgggactttaacaggtgctctcaaatgcagatttctgataacagataaaagtacagaactcataaaaagctaaaatgtttatggatatcaagcagaacaaagttaatagaatggatttagctaatggaaaactaaagcaatgcttttaacttttgcttaaagcattgctaattcttattttgtttttcagagtcagaaaaactttcttaaaagttttaaaccactgagcaaggtatactgcttaaacataatttggaccttgtctgtttctttttgcctggttctgctaaaaataaaaaactatttataagtattctttttttaaattttttaaattacactttaagttctagggtacatgtgcacaacatgcagttttgttacatatgtatacatgggccatgttgttgtgctgcacccattaactcgtcatttaacattaggcatatctcctaatgctatcccttccccctacccttaccccacgacaggccacagtgtgtgatattccccttcctgtgtccaagtgttgtcattgttcaattcccacctatgagtgaaaacatgcggtgtttggttttctgtccttgggatagtttgctcagaatgatggttcccagcttcatccatttccctacaaaggacatgaactcatcctcttttttggctgcatagtattccatggtgtatatgtgccacattttcttaatccagtctatcattgatgggcatttgggttggttccaagtctttgctattgtgaatagcagcacaataaacatacatttgcatgtgtctttatagcatgtgtctttatagcagcatgatttataattttttgggtatatacccagtaatgggattgctgggtcaaatggtatttctagttctagatctttgaagaatcaccacactgtcttccacaaaggatgaactagtttacagtcccaccaacagtgtaaaagcatttctatttctccacatcctctccagcgtctgttgtttcctgactttttaatgatcaccattctaactggtatgagatggtatctctttgtggtttggcttgcatttctctgatggccagtgatgatgagcattttttcatgtgtctgttggctgtgtaaatgtcttcttttgagaagtgtctgttcatatcctttgctcactttttgatggggttgtttgattttttcttgtaaatttgtttaagttctttgtagattctagatattagccctttgtcagatgggtagattttaaaacttttctcccattctgtaggttgcctgttcactctgatggtagtttcttttgctgtgcagaagctctttagtttaattagatctcacttgtcaattttggcttttgttgccattgctttcggtgttttagtcatgaagtccttgcccattcctatgtcctgagtggtattgcctaggttttcttctagggtttttatggttttaggtctaacacttaagtctttaatccaccttgaattaatttttgtataaagtgtaaggaagggatccagtttcagctttctacatatggctagccagttttcccagcaccatttattaaatagggaatcctttccccatttcttatttttgtcaggtttgtcaaagatcaggtggtggtagatgtgtggtgttatttctgaggctctgttctgttccattggtctatatctctgttttcatactagtatcatgctgttttggttactgtagccttgtagtacagtttgaaatcaggtagtgtgatgcctccagctttgttctcttggcttgggattgtcttggcaatgtgggctcttttttcgttccatatgaactttaaagtagtttttttttccaattctgtgaagaaagtcagaggtagcttgatggggatgacattgaatctataaattaccttgggcagtatggccattttcacaatattgattcttcctatccatgagcatggaatgtacttccatttgtttgtgtcctcttttatttcattgagcagtggcttatagttctccttgaagaggtccttcacattccttggaagatgtattcctaggtattttattctctttgtagcaattgtgaatgggagttcacttatgatttggctctctgtttgtctgttatttgtgtataggaatgtttgtgatttttgcacactgaaaaattttgtatcctgagagtttgctgaggttgcttatcagcttaaggagatgtggggctgagatgatgaagttttctaaatatacaatcatgtcttctgcaaacagggacaatttgacttcctcttttcctaattgaataccctttctttctctcctgattgccctggccagaacttccaacactaagttgaataggagtggtgagagagggcatccttgtcttgtgccagttttcaaaaggaatgcttccagtttttgcccattcagtatgatattggctgtgggtttgtcataaatagctcttattattttgagatacgtcccatcaatacctagttgattgagagtttttagaatgaagggttgttgaatttttgtcaaaggtcttttctgcatctattgagataatcatatggtttttgtatttggttctgtttatatgatggattaagtttatgatttgtgtatgttgaaccacccttgcatcccaggggtgaagccaacttgatcgtggtggataagctttttaatgtgctgctggatgcggtttgccagtattttattgaggatttttgcatcagtgttcatcagggatattggtctaaaattctctttttttgttgtgtttctgccagactttggtatcaggatgatgctggcctcacaaaatgagctagggaggattctgtctttttctattgattggaatattttcaggaggaatggtaccagctcctctttgtacctctggtagaattcagctgtgaatccgtctggtcctggacttttttttattggtatgctatcaattattgcctcaatttaagagcctgttattggtctattcagggattcaatttcttcctggtttagtcttgggagggtgcatgtgtccaggaatttatccatttcttctagattttctagtttatttgagtagagctgtttatagtattttctgatggtagtttgtatttctgtgagattggtggtgatatctcctttatcattttttattgtgtcgatttgattcttctctcttttcctctttattagtcttgctagccatctatcaattttgttgatctttttaaaaaaccagctcctggattcattgattttttggagggttttttgtgtctctatctccttcagttctgctctgatcttagttatttcttgccttctgctagcttttgaatgtgtttgctcttgcttctctagttcttttaattgtgatgttagggtgtcaattttagatctttcctgctttctcttatgggcatttaatgccataaatttccctctacccactgctttaaatgtgtcccagagattctgttatgttgtgtctttgttctcactggtttcaaagaacatctttatttctgccttcatttcattatttacccagtagtcattcaggagcaggttgttcagtttccatgtagttgtgcagttttgagtgagtttcttaatcctgagttcttatttgattgcactgtggtctaagagacagtttgttataatttctgttcttttacatttgctgaggagtgctttacttccaactgtgtggtcaattttggaataagtatgatgtggtgctgagaagaatctatattctcttgatttggggtggagaattctgtagatgtctattagatctgcttggtgcagagctgagttcaactcctggatatccttgttaactttctgtctcattgatctgtttaatggtaagagtggggtgttaaagtcttccattattattgtgtgggagtctaagtctctttgtcagtctctggtgacttgctttatgaatccgggtgctcctgtattgggtgcatatatatttaggatagttagctcttcttgtttaattgatccctttaccgttatgtaatggtcttctttgtctcttttgatctttgctggtttaaagtctgttttattagagactaggattgcaacccctgctcttttttttcctctcatttgcttggtagatcttcctccatccctttattttgagcctatgtgtgtctctggatgtgagatgggtctcctgaatgcagcacactgatgggtcttgactctttatccaatttcccagtctgtgtcttttaattggagcatttaacccatttacatttaaggttaatattgttatgtgtgaatttgatcctgtcattatgttagccggttattttgctcattagttgatgctgtttcttcctagcatcgatggtctttggaatttggcatgtttttgcagtggctggtaccagtttttcctttccatatttagtgcttctttcaggagctcttgtaaggcaggcctggtagtaacaaaatctctcagcatttgcttgtctgtaaaggattttatttctccttcacttatgcagcttaattttgctggatatgaaattctggttgaaaattcttttctttaagaatgttgaatattggcccccactctcttctggcttgtagagtttctgttgagagatccactgttagtctgatgggtttccctttgtgggtaacccgatctttctctctggctgcccttaacattttttccttcatttcaactttggcgaacctgacaattaattgtcttggagttactcttctcaaggagtatctttgtggtgttctctgtgtttcctgaatttgaattttggcctgccttgctaggttggggaagttctcctggataatatcttgaagagtgttttgcaacttggttccattctccccgtcattttcaggtacaccaatcagacatagattaagtcttttcacgtagtctcgtatttcttggaggctttgttcatttctttttactcttgtatctctaaacttctcttctcacttcatttcatttatttgatcttcaatcactgataccctttcttccacttgatcaaatcggctcctgaagcttgtgcatgcatcacgtagttcttgtgccatggttttcagctccatcaggtcatttaaggtcttctctatgctgtttactctagttagctctcttctaatcttttttcaaggtttttagcttctttgcgatgggtttgaacatcctcctttagcttggataaggctgttattattgatcatctgaagccttctctcaactcatctaagtcattttccatccaccttttttccattgctgatgaggagctgtgttcctttggaggagaagaggtgctctgatttttagaattttcagcttttctgctctggtttctccccatctttgtggttttatctacctttggtctttgatgatggtgatgtacagatggggttttagtgtggatgtcctttctgtttgttaattttccttctaacagtcaggaccctcagctgcaggtctgttgcagtttgctcgagttccactccagaccctgtttgcctgggtatcaccagcggaggctgcagaacagcaaatattgcagaatggcaaatattgctgcctgatccttcctctggaagcttcatctcagagggccacccagctgtatgaggtgtcagtcagccactactgggaggtttctcccagttaggctactcgggggtcagggacccacttgaggaggcagtctgtccattctcagatctcaaactctgtgttgggagaaccactactctcttcaaagctatcaataggaacgtttcagtctgcagaagtttctgctgccttttattcagctatgctctgcccccagaggtgtagtctacagaggcaggcaggcctccttgagctgcggtgggctccacccagttcgagcttcccagccactttgtttacttactcaaacctcagaaatggcacattcccctcccccagcctcactgccaccttgcagttttatctcagactgctgtgctagcagtgagcaagtctctgtggttgtgggaccctgcaagccaggcatgggatataatcttctggtgtgctgtttgctaagactgttggaaaagcacagtaatagggtgtgagtgtcccaattttccaggtacagtctgtcacagtttcccttggccaggaaagggaattccccaactccttgcacttcccaggtgaggtgatacacttccctgcattggctcacactccatgggctgcacctactgtccaacaagccccagtgagatgaacctggtagctcagttggaaatgtagaaatcacccatcttctgcatcgctcacgctgggagctgtggactggaactgttcctattcagccatcttggaacctctatcaactagttgtaagtattcttaacttgcaacaatatagttgtttgcatcaatgaaacaaaaatcctttttctattttttctttcttttgaaacatagtctcgctctgtctgtggctggcatgcagtggcaaaatcttagttcactgcaacctctgcctcccaggttcaagtgactctcccacctcagcctcctgagtagccagtactacaggtgtgcaccaccacggccagctaacttttgtatttttagtagatatggggtttcacaatgttggccaaggtggtcttgatctcttgatctgcccacctcaggctaccaaagtgctgtgattacaggcatgagccaccgtgcccagctgaaaaatccattttcttatgcagtgaaacacaatagaaaaatgctagttctttagcaaggctttaactggaagggtgtgttttcctttaagaaatcaagtttaagttgcaaagccagtaacagcctcttgggaaagctggtctcatacctgtagtctacacagttctcatacagaattcctggcctgtggtgagtaaaaaaatgtctctttctaacagactcagaaacactatgatcttgggacctcaaaaatacaggaatttacccaattcacaaatatttaagggtacaaatccatggcttagcccagctttagaaagtcctatctaagatttcttttggaacagagttccatcaaagcttatgaaaaaggcctatggagagatagttactcttgctgcactatgttcaaataggccaagtataataataaagtctattttgcaaacaattcagtctattgtgagttgtttttaactaaagaaaatctaaaaacaaaatcatgtttcaaagcttaccatacatttctcatgaacttctagtctcattgattgttttagagtttttgatgacgttttaaactaaccctgcttattcctgtaagccaaccagcaatctctgcctgcagctcagaaaacagaaagggaagggtaatgtaaaaatctaaatcaatatgctagttctgagcaattattctgtaaatccagctggaaataaataaggtgccaataacccagaggtttcttttatcagaaagtaaaatcaaaggagctaaccaaagccaagcctcatgcacccaaatcttagcaaacataactatagctaccaggtatcagggtgtgtcaacagcctcaacatttttaggcttttcctaccccccttaattcatttcaatgcctctcctctactaaaccagattgtttctttttgccttaaaaactatcaagctctaagtggtaatgcaaatggaatgacgcataaacacatgtttcttctgaggacaattaaactagccatggaagaagtcctagctgctgttttctacacagcacccctttccagcgaggaatagccaaaaatatcaatgcctcttctccctaacagcagttagggtctccactcctgaggaggaactgagagggattagctagctagcctaaggtagacagcaagggaagggtccctggagagcacccaacccatgggtcagtgcatcataactacatatccaccaagcccagcataatggcacacacctgtaatcctagtgactcaggaggctgaggcatgagaattgcttgaacctgggaggtggagggtgcagtgagatcacaccattacactccagcctgggcaacagagcaagactcagtcttaagaaaaaaaaaactcatctttcaccaatattttaatcgttttatgtctgcacacttaagcatcaaggacagggtcctggatgatgataagtgcatatttcaatttataaagtaaaaaatgaccatcagagtctaataaatgatgaatacagcaacatcatacttcataaaatcattccaggtatgtttgacaaacaagaaggttgcataggaccttcttgtgctactcatgtgaagtgctcttctctctcatgttaatctcaactcccaaccttacaaataccacatactcacatatacagaaaaagaaaaattaacttattttcataggaggctgtgattcacattttattctattacatcttttccacattgctgttacaatactgttgaagtgcaccctctttcaccagaagaatacttttgtgaacgtgaatagactgacactggagaagaccagctcagcacactcacttgaatgatccctttgcttttcaggcagtaaaaatcggggagtgaaaataaagtgactgcggattaagcaaagagttatacatggaaaaacatttgtcaattgtttgaagattacattgcatggtctacaacttttaaaatataaaatgcatagcataaatgttgcacaagaaagtagaataaaaatgatggagttggccacaaaggatagctaaagctgtactatagcaatatagaaaaatacatatttactgtcagaagaaggtaacttgaagtatttgaaagatgttctctaagaaactaaaactatttttagttttagattctgtaaaaaatgtttcttaagcatttttaattttcaaaaacatttgagtgcatttttgtcagcttagtttctctgaagaatttaaatataataaagtaatacatattaaaaataacttttctggcaatagagcagcttaatttttagattaaaaaagtaaaattttacacaattttatgctgaccaatttaatcaaaagcttctttcttacaacttggagaaatgacacaaagactcaacttttatgttgggtgggagagaaaatgattaccaggggctagaaacttgtttcactaatcaatgttgatttttattgctatattgtctcaaattatgttaataataaaataatggccttgatccaaaaaattttttacaaacttattgcttcaatcagccaaaatattaaccaaaagaaggcatagaaatagaggtatttaacagtcataatttatagtataaaattaaaatgtttctagaaataaagaaagatatataaacaaataagaaaaggaaaaaaagtggattcctcacaataggtagggtgtgaaatcaacataagggttcatcaacagttgaatgaattttaaaaagtggtatatttacacaatggaatgctctttattccttaaaaagaaagaagtcttggaggtgggctcagcagtctgtgtctcagcaagccttgcagaaattctgatgcacactgaagtttgagcgtcactggaatggacagtgtccaaatgattgctgggtcaccccacctatcctgaatgtcaggaacatcccgagtgagactagtcagtacattgtagctctttctccagccacaaccagaaagtctttgcttcccctttgccttccaccatgattgtaagtttcctgaagcctctccagctgtgcgaaactagaaaaagatgcacacccaaaagccccatttgaagcttctagacagaaagccaagcatttggagagtgtctttggacagttttaaacacaactgtggaaaagaaagcagccctactcagtgtgaagatgatgagaatgaagacctttatgatgatctacttccacttaataaatagtgactttagaatccttaacacagcactcagctaccaatgccaatgaataaaattttgcatcactgttgaaatctgttcaccactccttttgtagatgttctgagttgggtaccagaagtcaattatctcattattaagatggcttctaaggtgattcatttttgtgacacataatgagtgttagttgaggtctagctgtatgctgaaaaatgctgatgaaaaatgttgtctacagagaggatagtcaacttatattaactgtgagttatactaggagctatacttaattcatttagactttatttggtcagctttttttatatttcataaaaagaagaaagattaaaaaaagaagtctttttaaatatatattctgctcaaatcaccatttccttttttttctgattcaaaggactttttcaagatctttcagggattatattttctttcaccttctatctgcattctctttcttcagccaattgattaaaaaagagatgcagagaagacacatttgcttctcatccacacatcacttccacttgctattagtcattgtgagtagagctgagaatagcagctttctagcatgacagcaacttctcagaaaaaagcaacactcggaaacaaaactataaatcttttcaaaagctaatgtattttaagcaaaataagcagatgcatcaataataaaatgcttgtggtagaatcgatttattttgttgatttctattgagttcagataagatttgaccaaaagctagcaaatatagagcagaaagaagaatattatctgaaatcagaatatggtaaatgaagttaatttgtcaaaagaaataagaatattatgacctcatgctaatagtctcatctatggttgtaaaacatcaaatgctactttttattataaactgtagttcatataagtattccatttatatcaccctctttcactatttcaatgtcttctccactttgtatcagtggaaaacaggtcagctgcttccaggaaagcaggcaatgctcttcttactttaacaatgatgatgaagagcacttgttttggtgatactcccatgccaaaaactgttattttgcctgaagtactctatatttgttaataaaataaaattattaaccaagaggaatttatccattcaagttttatggaattttggttacatttaagtgtctctgactttcgtggaatattgaaatttttatgaatctaaatagagtactataaataaccttttactaaaagactttttgaagtggagtgatatttataaaaacttttcatagcattgaagaaatgttttaaccatgttcccagtaactactctgagcacagaattttccatttttagaattcgctctgagtcactcaggggaaattgatatctttacgaatgggcaaaaaaaggtgctgagtggaggtgcaacacattgcacatcaatgcttttcacatgcaactactagggtcttaatttgattgaactctcatttgcatagctagacacttactgaatctagtcatactattttttggcaactaatgccatgtttgttacccattagttttatacacttatttgcttggctgaaaaaacttaatcttctcttaatttactctaaattgagagactagatttacagtctgggtctataatagtagttgaatgtttttaatactattcttggcaaattctcatatattcacattcaaaacagatataaattttatgaaaaggagttgacaaaaagtaaaaaatttcaaataggttaagtaagttttgagatctattgcacagcagggtaactatagtaaactataaactattccatatttcagaataactaagagtaaattccaaatgtaccaccacaaaaatgataggtaagcaagttcatagatatgttattaaatgaaacttaattattcaatattttatacatatactaaaacatcacattgtatcccataactttatgcaactgtgatttgccaatcaaaaatactaatacattttttaataagaaagagtgaaataagctttaaaatattgcaccagagaaaaatgtggctgttaatcttaaaattttaggaaacatatacatatatgtatattttatttcaaatggcttgctcatttacagatgtaggtaagtaaacttttaatatcatgaacagtcagaacccagcactcagaaataggctgttgatttttaatgttcaaaataatatagtactttaaaagacagactctaaagcaactgtttacagtaaaattctaagtttttaaacaaatgatttccttcacttgttagaaaaaaattttaatatatatttttaaactatattgaaatttatcaaattaacataaatttattaaacaagtaaaaaaatgtgccttcttgtctctaattataaaactgacagagactctgcatttaaccaaatactttggtaaatggattttaacaatgatatctctcatgacttaaaacagccactagttttaatttagaagtatattaaatttttatattaaaatctaggattagtctattattacatagaaaatttgtggtctgcatgtacatcatcatccattgaatggtccacagtttctgagtttcagaaatgttaatataagaatacttcttctgattgaataatttaagttttctcagtaactaaaaaagattggaattactgatcactcacttataatgtggttttaaatgttatttaatgaagatatataaagtttcttttaaaatcattttaacaacatatttctcttgcttttcacttttattagaaaataagtatgaaaatttatgttaccacaagactataaattttatttaaatctagacataatgctaatcttaaaagatctgtatgtttaagattatggataaccaatttacacttaaaagataaataactgctttccagtaaatcaaatggggcaattttgactctcaattataagctattaaaatattaatactatcacctatgtggaaattttaggtatctgcatgttcatgttttttagcatataataaatcagaaactataaatttttataaactataaataataaactaaaaatttaaagtatcactttttgtcagttttgaaatactgtcattatttctaggtgatataacactcaattacagaggctgtggctgttgaaattagaaatgtcatggttgattcttctttacttgctgcctttttatttcacacaaactcagcagcacaaggaaggcaagaaatgctacaccttgattgcaaacacaccagtgcctttcaaaggagaataaatgtctgagcatattctcttgaaattcatggcatcttttgctcaagtacagactttcatatggaaaataataaagacaataatttcacatggcaatagcataagaaaagtactctaaaaataccttctgacccattatttctatttttcacaagaatgattgtgatggaatgagcatttgcagcactgtggtcataaataacccccactttctgttgaattatttttggaatgtgactataagacttttgtgctttttttttggaaaaaatattttatatttctaattcagtgatttagcataatttttagtctcacactttcaaaaatagttcattctgaaaaaaataagactaaaccacttaccaccttttcccccaaaagagtaacaaattaaatctatagtctactgcacagttaatacataaacgataaaggtgtaatttgttttacctgcacacttgaaaataaaacactttttgggctatagaccaagaactttcagagaggttagcttataaaatgtgaggagacctggtatagaaacattcaccactatgccttaaggggtgaaaatttgtctttcacccctaatttcaaccattaacccagagctggaaaaatagaacatgtcattataccaaaaagcattttattatttttattttatatttaaggggtacatgtgcagattcgtaaaacaggtagactacatgatattgaggtttgaacacttaattattccattgtctgagtagtttacatcatacctaagccaattttcaatgcttgtcacccttccttctcttattgttttcatctttgtttccatgtgcgcccaatttttagcgtccatgtatgagtgagaacatgtggcatttgtttttctgatgcatcagtttgcttagaataatggccttctgttgcattcatgttgcggcaaaagacattacttcattctcttccattgctgcgtagtattggaggttgtataagtacatcatttttcttatccaataaaagattcatgggcaactggtttaattctgtttttgctattgtgaatagtgttgcaatgaacatgtgagtgcttgtgtctctttggcaaaattatttattcttttttggggcagatacccactaatgggctagattagtcaaatggcaattctatttctagttctttgagaagtctccaaactgctttgcacaggccctgaattaatttgcattcccaccaacagtgtagaaagattttcttttctctgcaactttaacatcttatttatcttacttttaataacagtcattcttactggtgtgaaatggtatcacactgtcactttgatttacatcttcctgataattaggaatgttgagcaatttttacatgtttattggcagtgcttatgtcttcctttgagaagaagctggctattcatatcatttgtttgcttttttattaaatggtttatagattctgcatattaatccttcattgtcggcagtttgcaaatattttatttcatactgtaggtcatctgtttactttgttgatagtttctttcactgtgcagaagttctttgccttaattagatgtcattttttatttttatttttgtcgcactcatgttcatgttagtcataaattctttagagaggccaatattttctaagtgttcttctaagaattttgtagcttgaagactcacagatcaagtctttaatttatgttgttatttttttatatagaaaaaggtaggactccagttttcttccacatatgactaacaagttttcccagtattatttactgaatagggatttaattctgttggctttgtaaaaataacctggttgtaaagtatagcttaattcaggactgtctcttccatttcattggtctatatgtatatttttgtaccagaatcatgttatactggttactctgatgcaatcttggctcactgcaacctccacctcccagttcaagtggttctcttgcctcagcctcccaagtagctagaattacaggcatgtgccaccacatctggctaattttttgtatttagtagagacgcaggtttcaccgtgttggccagggtggtctcaaacttctgacctcaggtgatccatctgtgtaagcctcccaaagggctgagatgacaggcatgagccaccacactcagcccagatttattcttttagtttgaagttgtcttggctatttgagctctttaattcttttgtatatattttagaatagttttctttttctaattctataaaaaagcatcatggatagtctgataaaaatagcacttaatctgtaggttgctttagtcagaatgaccattttaattatattctttgaatccatcagcatgcaatatttttccatttatttgcattctcgctcatttctttcagcaatgttttcttcttctttgtacagatattttagctccttgatttaatgtatttcttgttttttttttttgtttgtggctattgtaaatagagctgtgttttttattttgttctgtttgaatattattggtgtatagaagtgctatgcatttgtgttgattttgtattctgaggtttttttggagtcttttttcaggcttcagagtcttctggtgaaatctttaaagtattctaggtagacaattctatcatcagtaaagataacttgactttgttttctgtttggattccttttatttctctggctaggacttcgtaacttcaataggactgtttagaatggatattcttgtcttatttttattcttatggagaatgctttcagtttctgcttttttagtatgatgttggctaaggatttgtcatagatgactcattattttggggtatgtttcatcaatgtctagtgtgttgacaatatttttatgagtcaatattggattttcttgaatgccttttctgccccattgtgttaaatattttttattttatttttacatggtgatcatacttattgacttgcatatgatgaaacatctttgcatttatggaataaagttcacatcattgtagcaaaataactttctgatttgcttttgaattcagtttgctagtatttcatggaggattattgttccaatattcacccagaatattgaactgtagtttctgtttttgttgtgtcttcactagattttagtttcatgtatttcactgatttcatataattagttagggtgaaatcccaccttgattttttggaatacattcagtaggcttaggaccagcttatcttcgtatatgtggtaaaacttgtctgtgatttcatatgatccagggctttttatgattagtaggtctattattacttattaaatgtcattatacatcttatacatttttgttgttaaagattgctgttattaggccaggtgcggtggctcaggcctgtaatcccagcattttgggaggacaaggtgggcagatcacgaagtaaggagatcgagaccatcctggctaaaatggtgaaaccccacctctactaaaaatacaaaaaattagccgggcttggtggcgggagcctgtagcccagctaattgggagtctgaggtgggagaatggcatgaacccatgaggcagagcttgcagtgagccaagatcacgccactgcattccagcctgggtgaccgagtgagactccatctcaaaaacaaaacaaaacaaaaacaaacaacaacaaaacaacaaaaaaaaagacttctgattttctggttcaatcttgagaagttttgtgcatccgggagtttatctattttctctaaatcttctactttgcatgcatgttcatagaagtctctgagaatatttttaaatctatgtagaattagatgtgatttcacatctctaacatttaaataaatgcagaataagagttaaacaaaattcaacattccttcatgataaatttctgaaaaaagtaggtataggacaaacgaacctcaagccaataaatgccacatataacaaacaaacaaaaaaaagcacagctaataacatactaaacagggaaatcttgtaagcttttactctaagagcaagaagacaaaaatgcccactttcttcagtcttattaaacatagtatgaactatccaagacagaaatattagaaaataaaatcaaagtgctgagattagaaaaattgttaaattattcctttgcaattttttatttctatacataatcttaagtaaacaaaagcctaagacattactaaaaattagtaggactaataaacaaatttattgaactttcagaatacaaaagcaacatccaagtgtcagtagaatttctatatattgacaactatctctaaatgaaatgacagaaattaatacacaattggaaaatattactcctttataaattggcattactaatattgttaagcatctgtattatacaaaatgatgtacagatataatgcaacctctatcaaaataccagtgatataattaacaaatttaaaaaactacatctaaaatttatagggtaccacaagagaacctgaatagccaaagcaaccaagccgtagaaaaagtgaaggtatcactacctgactttgaaatatattaaaagttttagtaaaaaaaaaaaaaaaaaagtacggtacttgcacaaaaacagacacacaggccagtagagaagaaaaaggagactaaaatatactgatgtatttacagccatctgctttttaaataaaggtggcaatttcttagggaaaaggcagtatcttcaataaatggtgttgagaaaactttatatccacatgcagaggaatataataagaccctcaactcacaccatatataaataaattagatatttaaataaaataaaaacacaaaataaatttgatacttaaatgtaaggtctaaaactctgaaactactacaaaaaataaagactgaaagccctgtaacattggttgggcagtgacttttaaaatttgacctcaagtctcaaggagcaaaatgaaaaaaatagatcaatcagattatttaaattaaaaaactgctgcaaagaacataatacaatcaacaggatgagacaaccaaaaaatggaaggaaatatttgcaaatcataaatgtgacaagggattaatatcaaaactatgtaacaaactcaaatgactatagaacaaaaaacaagtaactattaaaaatgagaaaaaggcttaaatatttttcagaaaaagacatacatatggccaacagatatatttttaaaatgctcaatgtcaattattatcagggaaagacaagcaaaaaaaaaaaagaaaaacgatgagatatcaactcgcttctgttagaatgactctaattaagaagaaaacgtgatggtagaaatctgaagaaaagaaaatgcttgcacactatttgtttgaatgtaagtgaggacagccattatgaaaaacttaatagagttttcttaaaaaacttaaaaatcaaactaccatataacaattgcaccattgtatatccaaaacaaatgaaatcagaatgaagaaacatttgcacttctaggttgtttgcagcactcttcacatgtaaaatatataaaatcaacagttcaacatctaatgagtaaataaagacaatgtggtagatatatacaatggaatactattcatctttaaacaacaaaaattctgttattttcaatcacagggattaacctggaggacattatattagttgaaataagcaaggcacagaaagattcatgtctcatgatttcacttacacgtggcttctaaaaaagttcatctcattgacgtagagagtaaaatggtgaccaccaagtgccaaggtatttagaagaaataggggcattgaaagatgtctgtcaaagaatatataattatacttggataaaagaaataatttccagagatttattgtacagcatggtgactatagttcataataatgcatttgtatttttgaaaaatgcttacaatttcatgttgtctaaccacaaaaatgttaccaatatgagacaaagcattaatcacatagaactaagcatttgacaatgtatatacacttcaaaatgttgttttataaaataaatattttgtcaagttaaaaatatatttttagacactatagaaggataacaatgttccaaatactgtctgtttcttttataaaacttagcagtatcctatcgtacagtttttcagctgttttgccagtcataaccataggaacgttgatgttcaacagcatgttctgaacccagcacagggcatgggagaagccaatgactttagggcttttattttaagcttgcggcacctggagttactggtgcttatggtaacagtacgaaagacaggaaaagggcaggttgcttatgctcccatgactggccactgtgtgatcacagtaaactggtttgcatgcaaactcacaggaaatgttttaatccaaaagctgccattatctccaaaagttttgagagaaaatgatcaaggagatcgctacacttaggtgaccaacaatataaactgtagactaaacttcagccactaaaatttttatttaaaaagtgagcgatacatttctccaaattgtagtatcaatatggaaaataaatattattccaaatttacaggttattttattgttttgcaacctttaacattcactttaaaatagacaattttgcatggaaatgtaggttgtgctctaagtacatcctaaataactaaatttaaaattgcttacttactattctcttaaaaattgaatctttataatatacatatggtctagcaaattatgtatttgccacactatgtataaaaatctaatatttttcttttacaaagaaacaccatgttgatttaatcctctcttcggtagacagtgtatgtcttttatgttaattaaccaatcttaaagttatactgataagcaaactttccagttaaaaccaatgtttcagtgcattaaaaaataccgatgttctccttaaaacctacaacataccatgtgaaatcgcatggcatgaaaacaacagtgagaaaactgtagccataacacagaaaaaggactgtgatgcatatatggtttgagtgcacttaaaaagacaaaacttagataattaagacgtgaatgaagcatttctctttaaattcagcaagattcagctttgcagcctggaaaaagatgttctgctcacatgaagaatcaatgttatttcttcacaatttgtattttccatctctgacttgaagttacaaacttcagcaggaatatttatgactaattataaagcatctgttacacactgagcactgtcatgtttgtttgctacatttatatataaaagcatccacatgacttatgaagcttccctagtacttactgaaacaaattgactcaataaataaaatttacttttgttacttataaaaagttaagggaacaataactaaagtaagcctatatatggttctcccatagaagctaatggaatgttttaactaaataaaatgtaacaatacacaaattgtggaattatatctaaaaataattttgtttgcatgatgaaattttacaaaaattattcttttaactacaaatcagctcagattaaatacttcataaactataaaacaaaaaaataagaaacaaaaagattatgggtctagcatgagtatcatgcaagtaaaaacaaaatttacatggaaatattctaaatgataagctataagataggtgtataaattgaatacaaagcagagagtatacatttgcttttattttatttttttaatttttgtatttttagtagagacggggtttagtagaggtcaggggtctcgatctcctgacctcgtgatccgcccgcctcagcctcccaaagtgctgggattacaggcgtgagccaccgcgcccagcctacatttgcttttagcatttttgaggatttttgtttcctagtaaattagacatcttattaaatgctttgtggtttcaatattcctcttttctcctgaaaatagttacaaacttacagtcaaacaaacacacttactccttaaacctaagttatatctttagactaatagatgtgtatatttaactctatgtaagtcaaaactaaaactcgattatgtgctttcaggcagaggccacatgtgcaaaaaatacataataaatttttgaaaattattcaggactcagaaatatattgattttatttacacttatttacaatttttatgatgaccataaaaataaccatgtagtcaataacaatttaattgtacaatttagaataactaagactgtagaattggtttgtaatacaaaacataaaagccagaggttataggtaccttatttatcacaatgtgattattatatattgtatgactgtatcaaaatatgccatctatggcataaatgtatacacatattatgtacacacaaaaactaagaaaaatttaaatgtaaaaaaaatttaacctgcaggaaccatattctttaacttatttgcagtttaaagccactgaaaaagaatactagagatgttagtctattatgttaccaaatagtgtattgttaccatcttttaaatatacccttaagtaaggtggaataggttaaaactagtggcataataacactttattgaatgtataacagtatttaacatgttataaatgttgaaataaaaaattaacacataatctaaaactttaaaaatgcaattttatcacataaaagtacaattaataaaatgacatactaatttaattaattttaactataaaatatgttattctctcataatattctctcataatactacattagtacatcacttagagccaggtgcagtggctcacacctattatcacagcactttgggaggccaaggcagacagatcacatgaggtcaaaagttcaagaacagcctggccaacatggcaaaaccttgttttactaaaatacaaaaattagctggatgtggttgtgggcacctgtaatctcagcttcttgggaggctgagacaggagaatatcttgaacctgggaggaggagcttacagtgagctgagatcataccactgcactccagcctgggaaacagagtgagattccctctcaaaaaaaaaaaaaaaaaaaactctgaatgcctacctcatacatcactcaattctataagttaatcacaaatagccttcctacttagattttcatcgtgcatcttacattttaatgtccttagtcatccataagaaatgtcataatgaccatgtaaaaagtctcccaaatctttgatgcagaaagaattgatcacatgcttttatatgggaatacaagagaaattaagaaatagcatgaagcaatttaagagttgaattccgtcattattcagtttccaaataagcttttttttttcttttgagacaatctcattatcacccgggcttcagtgcagtggcaaaatctcagctcactgaaacctctggctcccaggttcaagtgattctcatgcctcagcctcccaagtagctgggactacaggtgtgcaccaccatgtttggctaatttttgtatttatttttagtagacatggggttccaccttgttggccaggctggtcttgaactcctgacctcaggtgatctgcccatcttggcatcacaaagtattggccttacaggtgtaagccactgtgtctggcaaaaaaaaaaaaaaaaaaaaaaaatcggtatttttaagataaaagtatactttaaatgtaaatgtaactcttcaaaggtctacttctttcaaagtcatatacaaataatttttctttttaacaactttagttttggattttttcctatactcagcagtctgatttagtgtaatgtctgaagtttgagagataggtatttctactgtgaattatctatatttacataaacaattttggattaaatatttttatatttactgtatctgcaaaaatatattttagtataaactcttttgtgttttataattctgtagtttttgtaaaaatgtttttccaaatttattaaatttgcacggtcattcaatataaattccctgatgtttagcaaagttggaacaactacctaaggttttcctgtagtacaaaatgtgtacaataaaatctgtgatacaagtaaaggcactacaaccctctttatatttgtaatgtttttcctcaaaataaatattcttctgtattttaagggcttttattttctgaaagatctagtgacaataattgtacttttaatactttatttaatatgaactctctggtgttgaataagatgtgagaagatattagtggcattcacaatttttttttcccagtctctctgttgcccaggctagtatataaatgctttcctttgcaataaggcatgagtattggttaaatgtgtgccacattgtttattctagtagttttctccagtatattatcttacctacaatcaagtgtgacagccatttaaaggctttgtcacattcttcacatttctaggatttctcattcatatgatttcttttatattcagaaaagtctgaggtgttgccaaaagcattgtcacatctttcaggtttgtagagtctctcatgtatgaattagcctatgtttcttaagaattgaggatctgttagaggctttcccacattcttcacacatgcatggtttctctccagtatgagttgtcttatatgtagtaagccttaaggactggttaaaggctttgccacattccacacaattataggaattccctccagtatgaattacatgaatgtttagtaaggattgaggaacagctaaaaggcttgccacattcttcacatttgtagggtttccctcctgtataaattcccttatgttcagtaagggttgagaactaatgaaaagctttgccacgtttttcacatttgtagggcttttcctccagtatgaattcttttatgagtagtaaggtgtgaggaacagttgaagtctttatcacattcttcgcatttgtagggtttctctccagtatgaattctcttatgttccacaaggtttgaggaccggttgaagcctttgtcacattcttcacgtttgtagtgtttctctccagcatgaattttcttatgtgtaataaagattgaggactgtttaaaagctttgccacattcttcacctttgtagattttctctccagtatgaattttcttatgtttactagactgagaatcagctgaaggatttaccacattcttcacatttttagggattctctccagtatgaattttcttatgataactaacagttgaggatgacttaaaagctttgccacattcttcacatttgtagggtttctctccagtatgaattctcttgtgtctagtaaggcttgaggatctgctgaaggctttgccacattcttcacatttgtagggtttctctccagtatgaattatcttatgttcagtaaggatcgaggaccagctgaaggctttgccacattcttcacatttgtagcgtttctctccagtatgaattatcttatgtttagtaaggattgagaacgtactaaagcctttgccacattcttcacatttgtaaggtttctctgcagcatgaattctcttgtgtttagtaaagcttgaggaccaggtgaaggctttgccacattcttcacatttgtagggtttctctccagcatgaattctcttgtgttcagtaaggcttgaggaccagctgaaggctttgccacattcttcacacttgtagggtttctctccagtatgaattctcttatgttccatgagctttgaggatgagttggaagctttgccacattcttcacatttgtagggcttctcttcagcatgaattgccttatgtgtattaagggttgagaccttactaaaggctttgccacatccttcacatttgtagggtttctctccagtatgaataatcttatgtttagtaaggattgaggatcgattaaaagctttcccgcattcttcacatttgtagggtttctctccagcatgaattctcttgtgttcagtaaggcttgaggaccagctgaaggctttgccacattcttcacacttgtagggtttctctccagtatgaattctcttatgttccatgagctttgaggacgagttggaagctttgccacattcttcacatttgtagggcttctcttcagcatgaattgccttatgtgtattaagggttgagacgctactaaatcctttgccacattcttcacatttgtagggtttctctccagtatgaattatcttatgtttagtaaggattgaggatcgattaaaagctttgccacattcttcacatttgtagggtttctctccagtatgaattaccttatgtttagtaaggattgagaacttactaaaggctttgccacattcttcacatttgtagggtttctctccagtatgaatactcttataataagtaagggttgaggaccagttaaaagctttgccattttcttcacatttgtaggaattctctctagtataaattctttcatgttgagataggtgtgaaagcatgcaaaatgatctgacatattctttacatttcaaacctttctctccagtatgccttatcttatgtctgtttgaatttgaacatttatgaaagacgtttgcatatttgccacattgaaatactttgctctgtgtagttgttaaactctggttaagtttattataaccttctttgtgcacgttacactcatccacattggtacaactaatttttaagtgtaaattctcatgtccacatttgtcatatcttctcaatatcattttttggaaagaatcttctatgccttgctctggccaaaactcttgggaaaaatgagaacatataactgaaaagaaataaaaataacaaattaatctacatattagactcagataagtacagtttccaaatctaacctataaaattattcaaactacataagcaagacgacattgcaatatgacacaggccctaattcttcatagatatataaatgtaataaaaacatatagaccaaaatacatatgtgaataatttatacatgagttaagtgtgtgcatttcctcaattaagcccaatgcaaagagccacatagaaaacaagaaaagtttgttaaatttacccaatacaactctttctgctcctcaatattacctagtcccttcagaagcaaattgtccatttctgatttttttttttttttaaggaaagtaaaatattgacacatccaatttaatttttgtcttctatggctctttccacacactggtttctgtctctcatgacataaagtgctgaaatacatggtggtatactttgaaatgaaagtttgagcctgctgagatcaaaggtaaatgcactgcagcagagcactgcagtgccacagagagagtacaggtgtaccaagtgattacttttcagaagaaacataaatagtctcttttaactaaaaataaacacaaaatttcagacaagacaaacctgaagatgtttgagagacccacataatctctagccaagaccattattttctgactatgccaggacaaagctacattataaattttgtgacaggtggcctttttaaatgtccaaatctcaaagattacagtctatacaaaatagggcaatataatcttatcaaaaatattataaagttttcagaaagaaaccattgaaaatgtatatactaattttaaaaattgaatagcactcaatgagtgaagcaggaacacaaaagactatagaaaatgagaaaaatgaggataagaacaaaaataaccagtgaattgtcaacaaaagatttgcaggatagaagagaacagtgtgatatagtcaaagttctaaaaaaaaaaaaaaaaagcaaacaaaaaaaagaagctataaagtgagaataaataccatcagcaaatctgtcctgcctaaaagaaaaaaaaaaaaagagctttcaaaataaccaaattcttaaaaagtatattttgcactgcatacgtcttccataggaaagatgctgaaagtagttcttaccactgaaaataacataatgtaagaaaacaacacctagtcatataaaaatacattattttctaggaaagatatgcacacacaaaaaaattgaatttctagcattattctaatggtgcagaaaacatttttaattattctctaacatttgagagataaaagcacaggaattattataaacatctgttaatgaatatacaacataaatagataaacttagcaacatcagtgaaaaatttaagagcagacataataaggaggacttttttatgcaactgaagttaatttttcacctgattaaaatatattgttttatttttagaggttttatgtaatccccaagataccacacaaaaaaatctgtatacatacacaaaagaaaaataagaaaatgaaagcatatcaatacgaaaaccagaaagaaacaaaggaagacagaaagagaaaatgagggacaagatgaaagaattaaatagaataggtaataaaataaaagtaactcctttactttcagaaaattatttaaatatacggaaaattaactttcaaatcaacagaattttaatagatttattaacattttttcttttgagacaaagttttactcttgttgcccaggctggagtgcaatgacactatctcagctcaccgtaacctctgccacccaggttcaagcagttctcctgcctcacactcccgagtagctgggattacaaaagtctaccaacactaccagttaatttatgtatttttagtagagatgaggtttcacaatgttggccaggctggtctggaacccctcacaccttgggtgatccacctgccttggccacctaaagtgctaggattataggcacgagccgccatgcccaggttatttaaaaaattttaaatatcaagatccaacttgcctttctacaagagtcagttgaaatctaatgttaaaaagactcaaagtggcaagatggaagtagacatttcatgcaaatattagtcaagtgagagcagaagaggtcaaaataatattacacaagctaaatcttaagtcaaagactcatattttataaaatgcacttgacaatgaaactccaaagagacaaagaaagatattaaaaaataatagattaactgggaatctgtgaaaaatctgaatgtgtgtatgtgtgtgtctcacattaggattacaaatatataaagcaaatattgatagaatagaagaaacacaaggagatcaatataattatagtaggatattattataccacactttcggtaataaaaatgaaaatagaggaggctggcaagatggccaaataggaacagctctgatctgcagctcccagcaagactgacacagaaggtgggtggtttctgcatttccaactgaggtacccggtttatctcaacgggactggttgaacagtggatgcagctcatggagggtgagccgaagtggggtgcagtgttgcctcacccaggaagtgcaaggggttggggaactccctctcctagccaaaggaagggtttagggactgtaccataaagaacagtgctctccagcccagatactgtgcttttccatggtcttcacaacccacagaccagaagattccctctggtgcctatgacaccagggccctgggtttcaagcacaaaactgggaggccgtttgggcagacaccaaactagctgcaagagttttttcttttttttccccataccccagtatagtgcccagaaggccagtgagacagaaccattcactcccctggaaagaaggctgaagccagggagtcaagtggcctggctcagtgggtcccacaccatggagcccagcaaactaggacccactggcttgaaattctggctgcaagcacagcagtctaagcttgacctgggaagctcgagcttggtgggggaagggcgtctgccattgctgaggcttgagtaggcagctttaccctataaagccacccagaagattgaactgggtggagcccaccgcagctagcaagaccagactgtatctccaggttcctcctctttgggcagggcatctttgaaaaaaaaaaaaaaaaaaaaaaaaaaggcagcagccacagtcgggggcatatagtaaaaacacccatctccctgggacagagcacctgggggaagggacagctgggagcacagcttcagcagacttaaacatccctgctggacaactctgaagagagcagtgcatctaccagcacagcgttcaagcgctgctaagggtcatactgccacctcaagttggtccctgacatccgtgtctcctgattaagagacacctcccagtagaagctgatagagacctcatacaagagagctctggctggcatctggcaggtggcctctgggacaaaccttccagaggaaggaacaggcagcaatctttgttattctgcagcctctgctggtgatacccaggaaaaagggtctggagtggacctccagcaaggtctagcagatctgcagcagggaggcctgactgttaaaaggaaaactaacaaacagaaaggaatagaagcaacatctacaaaaaggatgtttactcagagacaccatccgaaggtcatcaacatcaaagaccaaaagtcaataaatccataaagatggggagaaaccagtgcaaaaaggctgaaaattccaaaaaccagaatgcctattctcctccaaaggatcacaactcatcaccagcaaaaaaaaaaaaacaaaactgaatggagaatgagtttgacgaattgacaaattcaaatttgcaaatttcagaggtgggtaataacaaactcctccaagctaaaggagcgtgttctaacccaatgccaggaagctaagaaccttgaaaaaaggttagaaggattgctaatgagaataatcagtttagagaagaacataaatgacctgatggagatgaaaaacacagcacgagaactttgtgaagcatgcataagtatcaatagctgaatcgataatgcagaagaaaggatatcagagattgaagatcagcttaatgaaataaagcaagaatacaagattagagaaaaaagaataaagagaaacaaacaaagcctccaagaaatatgggactatgaaaggaccaaatcttcgtttgattggggtacctgaaagtgatggggagaatggaaccaagtaggaaaacactcttcaggatatcatccaggagaatgtccccaacatagcacgacaggccaacattcaaattcagaaaatacagagaacaccacaaagatgctcctcaagaatagcaaccccaagagagagaatcgtcagattcaccaaggttgaaatgaagaaaaaaatgttgagggcagccacacagaaatgtagggttacccacaaagcaaagcccatcagactaacagtggatctctctgcagaaaccctacaagccagaagactggggggccaatattcaacattcttaaagataggaattttcaacccagaatttcatatccagccaaactaagcttcataagcgaaggtgaaataaaatcctttacagacaagcaaatgctgagagattttgtcaccaccaggcctgccttacaagagctcctaaaggaagcactgaacatcaaaaggaacaactggtaaaccagccactgcaaaaacataccaaattgtaaagaccatcgacactatgaagaaactgcatcaactaatgggcaaaataaccagctagcatcataatgacaggatcaaattcacacataacaatattaaccttaaatgtaaacaggctaaatgccccaattaaaagacacagactggcaaattgaataaagattcaagatccaacaaagtgctgtattcaggagatccatctcacatgcaaagacacatataggctcaaaataaattgatggaggaatatttaccaagcaaatggaaagcaaaagaaagcaggggctgcaattctattctctgataaaacagatgttcagccaacaaagatcaaaagagacaaagatgggcattacataatggtaaaaggatcaatgcaacaagaagagctaactatcgtaaatatatatgcgcccaacacaggagcacccagaatcataaagcaagttcttaaagacctacaaagaaacttagattcccatactgtaatagtgggagactttaacaccccactgtcaatattagacagataaatgagacaaaaaactaacaaggatgttcaggacttgaactcaagcagacctaatagacatctacagggctctaccccaaatcaacagaatatacattcttctcagcatcacatcacacttattctaaaattaaccacataattggaagtaaaacagtcctcagcaaaagtaaaaaaacagaaataataacaaacagtctctcagaccacagtgcaatcaaattagaactcaggattgagaaactcacgcaaaaccgtacaattacatggaaaattaacaacctgctcctgaatgactacagggtaaataattaaatgaaggcagaaataaaaaagttctttgaaaccaatgagaacaaagacaaaacataccagaatctctgggacacagacaaagcagcagtgtctacaaaatttgtagcactaaatgcccacaagagaaagcaggaaagatctaaaattgacaacttaaaatcacaattaaaagaactagagaagaacaatcaaattcaaaccctagcagaatacaagaaataactaagaacagagcagaactgaaggagatagacacaaaaaacccttcaaaaaaatcagtgaatccaggagctattttttttttcaaaaagatcaacaaaatagatagactgctagccagtctaaaaaggaagaaaggagagaagaatcaaatagatgcaatcaaaaataataaaggggacaccgccactgattccacagaaatacaaactaccatgagagaatactataaacgtctctatgcaaataaactagaaaatctagaagaaatgaataaatcccaggacacatacaccctcccaagtctaaatcaggaagaagtcaaatccctgcatagaccaataacaagttctgaaattgaggcggtacttatgggcctaccaaccaaaaatgtccagaatctgatggattcacagcctttgtaccagaggtacaaagaagagccgattctttctgaaactattcccaacaatagaaaaagagggactcttccataactcattttatgaggccagcatcatcctgataccaaagcctggcagagacacaacaaaaaaagaaaatttcaggccaatatccctgatgaacactgatgcaaaactcctcaataaaatactggtaaaccgaatccagcagcacatcaaaaagcttatccaccaagatcaagttggcttcatccctggaatgcaaggtttgttcaacatacacaaatcaataaatgtaatctatcacataaacagaaccaaagacaaaaaccacatgattatctcaatagatgcaggaaaggcttttgacaaaattcaacacctttcgtgctaaaaactctcactaaactaggtagagatggaacatatctcaaaataataagatgtatttatgacaaacccacagacaatatcatactgaatgggcaaaactgtaagcattccctttgaaaactggcacaagacaaggatgccctctctcaccactcctattcaacatagtattggaagttctggtgagggcaatcaggcaagaaaaagaaataaatgatattcaaataggaaaagaggaagtcaaatagtctctatttgcagatgacatgtttgtatatttagaaaaccccattgtctcagcccaaaatctacctaagctgataagcaacttcagcaaagtctcaggatagaaaatcaatgtgaaaaaatcacaagcattcttatacaccaataatagagagccaaatcatgagtgaactcccatttacaattgctacaaagagaataaaatacctaggaatacaacttacaagggatgtgaaggaactcttcaaggagaactacaaaccacagctcaagaaaataagagaggacacaaacaaatggaagaacattccacgctcatgcataggaacaatcaatatcgtgaaaatggccatactgcccaaagtaatttacagattcaatgccattcccatcaagctaccatttactttcttcacagaattagaaaaaactactttaaatttcatatggaaccaaaaaaaaaatctcacatggccaaggcaatcctaagcaaaaagaacaaagctggaggcatcatgatacctgacttcaaattatactacaaggctacagtaaccaaaacagtatggtactggtatccaaacagatatatagacaactgaaacagaacagagccctcagaaataacctcacacatctacaaccatctgatctttgacaaacctgacaaaaacaagaaatggggaaaggattccctatttaataaatgatgttgaaaaaacttgctagccatatgcagaaaaatgaaactggaccccttccttacaccttatacaaaaattaactcaaattgatttaaagatgtaaaagatttaaagatgatgtaataccccaaaccataaaaatcctagaagaaaacctagagaatactactcaggacacaagcatgggcaaatacttcatgactaaaagagcaaaagcaatggcaatgaaagccaaaattgacaaaagggacctaatttaactaaagagcttctacacagcaaaagaaactatcatcagagtgaacaggcaacctacagaatgggagaaaaattttgcaatctatccatctgacaaagggctaatatccaggatctacaaagaacttaaacaaatttacaagaaaaaaaacaaacaaccccatcaaaaattgggcaaaggatatgaacagacacttctcaaaagaagacatttatgcagcgaacagacacatgaaaaaaagcacatcattactggtcattagagaaatgtaagtcaaaaccaaaatgagataccatctcacaccagttagaatggagatcattaagaagccaggaaacaacagatgctgcaaagatgtggagaagtagaaaagcttttacactgctgagtggagtgtaaattagttcagccattgtggaagacaatgtggcgattcctcaaggatctagaactagaaataccatttgacccagtaatcccattactgggtatataatcaaaagtttataaatcattctactataaagacacatgcacatgtatgtttactgcagcactattcacaatagcaaagatttggaaccaagccaaatgcccatcagtaatatactggataaagaaaatgtggtacatatacaccatggaatactatgcagccataaaaaaaatgaattcacatcctttgcagggacacggatgaagctggaaaccatcattctcagcaaactaacacaagaacagaaaacaaaacacagcatcttctcaaatatacaggaatttaacaaaacactcgagcacgctcttatgcaaaggttgtaataatactgtaaagatgttcatcctgctcaatgtaatctacacagttaatgaaatgttcctcaaatttctcactgcatttttgaaaaaatagaaacagcaaccctaaaagtatatagaatctcaaaagacaatacccaacaatcttaaaataataataataataaagcaatgttgcaggcattaaagttcctgatttcaaaagacattccaagctacagaattaaaacaatctggttaagtataaggatgaaaaattagactaataaaatagaatgcaacatatatatatatatatatatatatatatatatatacatacacactttaagatatatggtcatatgaggagtcatttacatagcaataattattactgtaaactaataaaggcaatgcaaatttgttaccaaatcattcagtaaatataatttgaaatataaaaatactggaatatcactcagttttcaaaagcagaaattataaagcaattataaagataaatcttgataacattatgcaaaatgaaatgagtcagccataaaaagacaaagattctatgagatagatagatataaagcaattacactcttagaaacagataaaaagaaaaaggtcccctatttgcttaacccccaacagcaagaaagtctgtcagtcatccacgacaaaaatgtcttaatgagagaatcagacatcatggttaacatctgtaatgacagctacatggtatagaaaggttggagaattgctgcaggccaaaactttaagaccaacctgggttatgtagtgagaccttatctcaaaaataagtgcctttaagagagctttgagatccagtgagggaattgtgaaactttgctaaagcccaagattgaggagcacccttttcagaaggcaagctttcattcaggtggcaaactagaggacccctgctcttgactacagaccagaaaatgtcccaccctacttggtcccacagagaattttgaacttactctgtaaccatcccaaactcctcccagccacagtctgtgagaggtcttggtcctccagaggcttggagactgatacccatttagagccatgctggcaggcctgcagaccttggtccttactgtcgtcccaatagcagttccatgactcagttccagcttcctaagccacagttcatggccagttctgcctacatagaatcccacagtgacctcagaaatcctctctggtactcaatgaaaagccatactaatccacatcctaatataaagcccaccatatgcagacttgactgtagaaacctgccctagcgtctaccctactgagcaacgtcctgaaggatatttactctgtccaaaaataaaatgggaattacaactgcccaagccccttgtaataagccaaccctagtgcagagccagcagccttgtgaccaagctacaaccccactctactacaaacccagagggcattctatcaccctgggggccccaaaaaagaagatttttaccctctgaaaccagtttataaaaattttaagaggtgtttactccttcaaattcagacaccaatgcaaaagcatactgtgccactgacaatgcttctatcttaacacagcacttgaagtatgtggaagaaaaattagtcaaaaaaatttttaagtcactgaaattgaaggcaaataagtaaaacattgctgtttgtagatcatgcaatgttctctataaaaaaccataaacagtacattaaaatcttttcaaactaataaatacactcagcaaattagcaaaatataaaattaacatacaagtataagttatgattccatacacttaaactatctgataaaatagaaaaagaaaaccatcttatttacaatagcactaaaataataaatatctgagaacaaatttaattgaggagctgaaaaacttttcaaggatttatcaatgaaaaatgagagaacacaaataaatttaaatatattttatgtctatagattcaaataaatgttaaaatatcatattacccaaagtgatctctagattcagtaaactctgtcaatattccagtgtttttctttcacagtaatgaaaaatacaatcataaaatttacatgaagctacaagaaactgtgaatagccaaagcaatcttgaggaaaaataaaaaagcagaaggatattatactttataatttcaaactatatttcaagactatagtaataaaaacagaatgaaatgtgcagaaaaatgaaccaaaaaaaccccaatgatacagaaaccactactctcacacacttcagagatgatggaaaaagagaacttaaaagatagtttaacatggagtaccttaaaattacgcggatatctatgtgtccacaaaaacaaaaaaaagtcagattgcactctcttgtatgccatgaacagtactttggctatcactgtaaacttgaaggaaaattacttaagggaaagaagaattcttagaaattttaaaagcataagttagaagatgcccctgtgtgagagaaaattaaaaaataaaaataaaaattagctttccagaaacaactacttttggaacacagcttcccaaatgactttaaggactggcttcctcattgactttggacttctcattcatgttgtctgtattcactctcacctacctgggggttcttccaccatctcatgtctcttcatattccagggctcttttccttgctccagaaaaatgatcaggtctggcttaaaggcagcaatacctgttttattaaaaatgaacaacatccatcttgctcatattctccaattaccaacttagtaatgtgctcagtaaagaggatgtaatagaatattctaatacatttatcccaaaatactaaattataacatgtctgttgaagaaaaacgttatgtgcagttgcttaaagttctgttgaaacagtctggagctcaagttaattcacaaacattaagcttcttcagaaggttattgcgcataacccatggtttctgcaggcaggtactctcactgtggaaaactggaacagagtaggagatggattgaaatgggttcgtcaaaaaggtcttaaaggagacccttctgtgttttctgcttggggtttggtttgcacggtcctactgccgctgtctccttcttattttgtcagacaacaggagtcaggttttgagtctcaagaattaaaaagataatttcttcctccaacagcgcctattgaaaataatgagcaggagaaagggaagaattgtccatttgctaagcaggaaaaaggagaggagaattggcctctgctaccccctccaataacagaagtagaaactcccatacaaaaaattttgcatgctgatgctgcggctagggaacctttaggaccttgtgcttttcctattactgtgaggcctgatccaaacaatctgcaacatcttttacatgagcacactcctgtacagtttaaattactgaaagaattaaaagctagtgtggttaataatggagtgcaaagcccattcactatagggctgttagaattggtgttcagagccatgcacctcccactctttgatataaaacatttgggttgcacttgcttatccgccagtgcatacctgatatggagcttaaactggcaagaaatgtgtgcagatcaggctaggtagaatcacactgctggtcaaggaaacattagagagaaaatgatgacaggcaatggcccattttcagatctggtacaataattaacattcccagatgctgcttaccactggtctgccttagccgccaagcatgcttggagcacaattcctgaagagggagttccagtgcagtctttctacatgtcatgcagggatcatgagagccttatgcacaatatatcacatggctgcaagaggcagtgtggcatcagatccctaatgcccctgctgcagaaatgcttaccataattctaacctatgaaaatgtaaatgcagattgcaagtgtgcaatggctcctgtgagatccacacaaagcttggggaattaccttaaagcttgtcagaatgcaggaactgaatttcattgttctacaatgttagcacaagcaatggctagtttagtagttgacagatctaaaaggagccaaggttcaaaccctaaagtgggaaaatgttacaactgtggaaaaactggacatttcaaaaaggaatgccaccagatctcaggacagaaaggaccttacaatgcggtgctccccaccccgagcagaaaaaacaccaggattctgtcctcgctgtaacaaagggaatcactgggctgtaacaatggacatcattgggcgaatcagtgccgctcaaaatttcatcataataacacccccgctaggaaacaagaaggggccctggacccagtcccctcaaacaatgacggcattcccagttcaggccacaaccccacttcaagggttggtcccaggagaaacattgattccctctccccaggaacaccaggaagtgcacgattagatctcccagtcagagaaagaattacattagttataggagacaaacctaccaaagtacccactgtcatttggggacctataccagcaggatacatgggactaattttaggcaaaagctgccttaacttgcaaggcatcactgtaatcccaggagtagttgactccaattataaaggagaaatccaagtagttttaatgtcacaagatctttgggtttttgaaccaggggaatatatagtgcaattattgcttatgccctgcaaattacacccttttccacaaaaggagaaatgaggaaataaagggtttgggagcacaactacatgagaaatctatccatcacaactcatagcctctaacagactcacctgtgtagtacaaactaaaggaaagaaattttatgggcttatggaaacaggagccgatgtgtcagtaatacccagtaaggattagcccccgtcttggcacattttgggtcgcatccctgggctatggatttctaataatctgtccaagccttgggctgccacccctgctttgcactttgtgaaacttcttctaactcaacttacttatcgtgtccgcagacccttaggcatgataatttttgctattgtttccttggtcacactaataacttctattgtgatgtcctctgtagctttgcatagttctattcaacagctcagtatgtggagaactggatgcagaggcatacagccaaccaagcatggctactaaagaataaaattaacactgagttataaacaagtggcaatgttgaaatccatggttctatggttaggagaacaattacaaaacttacaattgaaagagcaattgtgctatcatttaaatcacactcatatatgtgtaaccaacgtagaatataaccaaagcgagtatccatgggaccttgtgaaagcccatttgcggggagctttcacacccaacatcacctttgatactggtgaattacaaaacaaaattcttgatttaaataagcaaactcaagagtttcagccttctttagaagactggaccgaattccagcaaggcctggagagcctcaatccttggacctatctaaagcaccacacaaacatctcatatgtagtttttggagtaatgctgttctgtctctgttttctgttcatagtctgtaaaatccgacggaccaatcacaaaatgagagctgcccaacctggccttacgtttatttgattaatgcataaacaggaagggggaaatgttgggagctgaatgcctgagtgttgtgaccaactcagcattccactggaggctatatgatcaaacagcaaactgtttatcatgagtgcagaatgtgggcaaacttgcttctgctcctgccaccagaaggtatactgaggacagtcactccctggtgccatgctccttggagttatctactggaacatctggagagtactgttcaaagaatacagtcatgcaggcctgcattaagtcaagcagctgaccacaacctcccccttctccctatctcctttactcaataaatacaaagggctatagaagctcaggacccttgttcaccagaagcaaggagtccacgaccccttcttccaaatatactcttttgtctttgtctgtattctcgcattcatcctcctttgttcagtccaataaggtctgcagcaaaatgaaacctgtagtatatactaggaattgcgtattaaagttattctcacccaggaagaccaggtttctgtagttctctaacatcacattcctatataaattctgctgtgtagaatccaggcattgccactcctccagagagaattctatggccacatccctaaatgtcaatgctccctggaaaacacacacaaacacatatatttaccaattggtcatgggcagaacttttaatgtgactcaaggtaaaatggagagagtagagagagctggttctgacttatatgaatgactgaaattattcaataaaatagttttcaacacagaaatgttcactaatgtattctctaactctgagaaaagaaagtggtataagatccataacatctgtgtatatgtaatatttttctagataataaagtataaaattgagggcaaaaacactaacatgtacaattttgagtgctatatttacatcatacagaattgtgtgccaggcatggtggctcatgcctgtaatcccagcactttgggaggctgaggtgggcagatcacctgaggttgggagttcgagaccagcctgaccaacatggtgaaaccccgtctctactaaaaacacaaaattagccatgcatggtggcacatggctgtaatcctagctactcgggaggctgaggcaggagaattgcttgaacccaggaggcggaggctgcagtgagccaagattcattgcactctagcttgggcaacaagagtgaaactccatctcaaaaaaaaaaaaaaaaattcatcgtgtgtatttttcagatggaaaagacatagttttgcatattattcagatggaatagacatgttgagttagaaggtatgactcaaattttaatgtgtgcaataagctagagatcctgttaatgcaattttttttttttcagatctgggataaagtctgagttgctgaatttctaataagctcatcagtatgccaatgtttttggcccaaaaagactattttttaaaacatccagtaatagaatgagcctgtgtttttctgtttttctggtttgtaaacaaagataagagccttcattttccaaaaacagacaaatgcaaaggaaacctaagaaagaagggcagctgtcagattaaatgttttggtttattcacatcagctgcataaagatatttaatgatgaagaggaaaatgattaattccatagtaaaaaaatgtgtcagagagcttatcaaccaagtgatttattaacatcaattacactagaacacatttttttaatgtcctgatgtacccagaaggacacagtattactgctgagatattgccccccctctgaaaggtaaattatagtctgaatttaaccataaggaaacattagttttatggaaagttcaagatagagatatctcccatgttctgtaacttttagtagtgattttaaatagtatttcttcagcactgagagagcaggtatctcctaacaattttttttagaattttctgggtaataaataccacactgcttcaatgagtgttttcttaatcttgtactgcatagacataataaagaacacagatgaaaccacaacattacatgttctctgtcttcactaaaaaccccaggttttccccaatatgaattttgagtatctacactttcccatgttcaacagccacaaagggacatttttaatattgcagattataaattcatagtgagatttctgcatggcatataagaagccataatatagagaaagctctggtatatagaaaaaaatatatttttcagagactttgattattgtaagaattttttaaagcagttaagacaaactcattagggaggaaaaacacaggtacacagaagtacaggtttgcaagtactaaacgtatgtttcctggaggaagaatagtggacacagatcttgatctcagacatgtttaggtgaaaaagaaaaggccatttttttctctttctcctccttccctaggattctttctcagataaaattttctagacaaattacacctgcatcttgagaatatgcctttaaaagtgtcagcaccacaggtctacctgctgtcaccacatccacaggcagaagaaccaagacagaaaaactccatccatttctgtcctttatagcagaagagatgaagaaacaatgagtagctccacagagataaaaatatgcttttctttattttgtcctcaggagccatcccctgacacaggcaccagcaatttctgccacagtaatgtaaatatgggccacggtgtactgtccctaccaaatccaaacagaacaggttcttggaccaccctttaatgcaaagatggaacttaactctcatgaatgtattatgaattcctcatacttgattctggcctcaccttagagtcacatgagccacttaattaaaacaacatgaatgcttccaccaagaacaataaacagaatccatggaaagggcacaagtaaagagagttctgcaaaatggccaggtgatactaattagaagcctgggctgataaccccttaactaagcatttcctctcaagctctaaggagcttataaatgacttggtaattttggccccactctatgaaatgtaattctgcaggtatggaaagggtccataaatgggtcacttaaacaagtgcgctgtcaataatgatgttgctcccactgggcttattattagcattaattagagaaatgaggcagaacacagatacttctggtacaaatgaaaacaatcattcttcatcctaaagtattatattatttgctgactctttaaaatttacagagaaaacagaaagcagcaatttctgagtaagtcagcatttggaaaacaacgtgtgcacatgtactaatgcaatgtttattaagcaggtactatgtgctcaataggatgttagagtactgtgatagcacattatgtgatttaatcctaataacaccctttcagttgatactaagtgttcaataattccaaggctttaaaggacccagcatttttatttctatttgtttatctgtcattgatttttcaaaaaatgcatagaataaaagctaactatagacagatgaaagggatacagatggaaagagcttaataaaatttagataaatttttattgtgtttatatttactttcttgtgacttgtgaatcaactgcaaagaatagaaaacagaacagaaaacagaaatcagctgcaggaacagaaaacaagttgctaaataatgtctctgcaagcactggttttaattaaaaatttgtaaagtaagattctataatacatactttatatttcccatttatctgcttttaagtctcagaaaatgttgaacaccagctctaaaaaggcaacagtattcatgacccaaaactctgatctcttctaatcagttctttgaggcaagactccagggtagggccagacataaataaggcctccaaaaagggtgaatatgaacagggctggggcagagtgtagagccaatgtacaattctgttctctatggcactggggggtattgtaagttctttttttttaaatcttacttaagtaaacttaaatctgagtttgtataattttaatcttttttagccactgccctgtaaattttatattacatactaataagaaatttaaaaaaaaatcccttaaggttttctataataatttttttagaagaaaaataagtattcttagcagggtaaaagaactacaaataataataacaactcttccaattataagttcaggtgtagacatcagaaaccacaatataaagaaagtggctcaaataaagcccaagttgttttttgcacatctatttattgtacccaccatatgatgcataattcaaccatttttccagttgttagtttagactaaaacttccaggatggtaggaatcatgactgcttcatcaatttttttttttttttttttttgagactgagtctcactttgttgcggaggctggagtgcaatggtgtgatctcggctcactgtagtctccacctaacaggttaaagagattctcctgcctcagcctcccaagtagccaggactacaggcatgagccaccacacctggctaaaatatgttggtttattcaacacattattcaatattattcaatatggtgaaatccctatttcaccatgttggccaagctggtctcgaactcctgacctcaggtgatccaccatcttggcttcccaaagtactgggattacaggtatgagacactgcacccagcctgcttcttctatttttttttatgactatatgaaattgaagcaattagtttatctctttgagcctccagacctcctgattttttactcaagtaccagggatctgttctggacattctcaaatgtctcagagattcgtaggtgattgtgagagggttcccagtgaacctgggctgatggtccaatgataagacagacagagaagactcaggatgattctaaataaaaaatggaactactttggctgaactccagaatctgggttgcctgtcctgatttgctagctgttgggtaagtagaaggacaagaatactctactccagtatcacattttacaagtaggtatagttgtggtgtggctctggatactttgtggccttaagatgattgtttacacttacagattctgccatcagattctatttactcctggagcctctcacataactggggcaggttaatgaagatgtgaaaggtcaaaaggccacactctcaaaaaaggaaattaaaatgtctatgttgatatctcacaatgcagaaaatgcctcctgttggttttctgtaaattctcaatccaaagtctggctttgccttgtaaattccaggcagaggccaggtcttatttacaaattctaggtgaaatcaacctcactctgcatttttgggtgttacagcaagtaaagtgaaatgaaaggagagatcccctcttagaggctgctctagaacattctaaataatattttacctgaaaaaagctgacacaacatgaacataagcagacagtttatttgggtcaagcttaaggattttaacttgagacaaaatattcaagttgcctggaatctacactttcattagcagcacttacaagtggatttgtaaaggcaaaaaaaaaaaaaaaaaaaaaaaaaaagaggtacagtgaatgagctgatacgaaattggttgtgagaaattttacttatgtaaagaaataactttaataattgattgcatatacatcaaggttaagggtatggaatttagtgtccagagtggaattattggtctaatttaaagctacttgtggcaatagtgaacagtttcaagagataaatacatagctgaagaaaagggagaaaaacataactgtgctcattttaatggctctctgactttgataactaaaaggacttgcattcctcagataaaaacttttttttttcttttcaattctcaagacctagatttagaatttggagctgcaaattcaggtcctgcatgggtaaagtagcagcaggtggtatctgaatatttgtgggcattatagcatgaggagggagggagaactggattctcacgtctacaggtctactcaatgcacatattttactctgattgggtttctgtgccccatggtcactgaatcagtttcaggtctgaagacacaagtcattgaaagaggtaaaacggttaatatctgacctataaagtttgtagaaatctgttctagcctctctaaaagtgactgcagaggatgatagataccaagtaggcagagacacaattccacctgcatatttagggtacagcatgcacttcgcagcacaattgtgaatggactggaagcctgagtggaaaaggcccatctatagtaaagcttagttggtaccctatgtgtttatattatgtctggtaattctagacaaggtttggaaaatacagttagaagcaaaattttcttcagccccagaggaattaaataataacagaacagaaagaaaactgttttattacacaattacatgtgaatgtgacatgcattacagtcaatttgctcaagagattgcaaagacagaaagacagtcaccataattcatctacaagtagaatttacagcaccatgtcatacatagttcatcctgaattcatctggtagctgggaaggccatccctgtatgctaactggttataatcaatgacaaagtaaagctttcacatcttcatgactagaggtagttttgcaacttgaaccccagggcctgctgaaggtaggctttgactcttctacaaaaagtgttgattcgggtgctatctttttggctatttacattttaaagcaatagctctctactctctgagcactgggctagaacactcctgctttccctctcttggtggctagtgtactctcttgaccccaccatctgccactgaggcacagcccacagcacagggctcacagctggaaactcacatcttaggtgaaccccatttgccacagcagcactccagtgccacatcagacagtgaagcctgagcagcaggaggagagcctgcaggcctcctgggtagaattgcaccttcacaataatagaaaagggagcactgtttcagcctcagtttttatttataatggcggcatgaaaaaaatactgctggattttagcatgagtccagatagagatagctctgagagttctcactgtgacagcccacgtctttcacagacaccacggaatactaatagggcttctgaaacagatacacaatgcattagagagaaaaacagctcttattctgagaaagattatattgagagaaaaaagttaaaagtgtcttaagaaaaaactgagattagatataagattgatcaagtcagccagaaaatatttccctaagaagaatttctctccaaacacccaaagtgcatagctactctcagcaagagaaacatgagcattattgaataaagggggtatattctcagcacaattttttttttttgagatggagtttcattcttgttgcccaggctggagtgcaatggcatgatcttggctcactgcaacctctgcctcctgggctcaagcgattctcctgtctcagcctcccaaatagctgggactatagacacacaccaccacacctggctaattctgtatttttggtagaaacgaggtttcaccatgttgtccaggctggtctcaaactcctgacctcaggtgatccacccaccttggcctcccaaagtgttgagattacaggcatgagccacagcgcctagctctcagcagaattttaaaagatttatcttccatctctgctgctctcttatttcctaaccattgaatgtgagatctacactggaatatatctgacaacttccaccagcacttttttataaaaaattgaaatctgactgtgttaatatagtagaatatattagagcttgcaacatacctaactggagagctattacagtttttgagtagccatatcacctgtctttatttatcctgtaatagcagcatactaatttggtaaaatatatgacactaaaattatgcctacctataatttttcctattgggtaaattaataagcatgtcagactaacatctactgtaacaatttaatggtaaaatttttgggatagcagatatgaatatataagtatgaataattttatgtactagtcataatgtatgtaagattttttaaaattatctgaactataattcagttgaaacactatatttcaaaagtatgaataacaatattaaaataaggaattcaatcaaagtaaatattgtggccttaaatttatactattctagaaaatactgtttaatttacatgaatgcaggttgtctacaaacactacacataactatactaactgtactgaagcaacccaagtacaacagactccactgttcagtttatacactgaactcttctggctttcgcagtgtaagtatttcagcctgcaaataatcaccttggataatcgggtttctgccaaagaacttactcaggatcttttagtctttattattctgtattgctaaattaatccgatctttgtgcttaactttattaggctcttgaaataaattttactctcaacaaatctgtgtctactttaaagactaaagataaaaatatatataatcttttgccaagaaaaaaggaaagcaatgaatctcaggtcccagataaagacaattctgagtcaaaagaatgacaaaaggtttgtttcatttctaatatgatttacatatatttcaaaaagcagaagaaatatatacatataatctaaacctttttttaaaaatcagcaagttatccacccttattttcacatatgagaataaagcctcttatttctcatttatattttctcttacaaaagccaggtctctggacaagttcttgaactcttggacatctgaattttgcacactgtgtgcacttaaaagaatgtttatggggggaaaagcagaagagagaaaattgttataaaaaaaaaccatgggttcacatgaataaagcaaattattagagacctatgaagagacttagaatctgacagtaataatcggggactacatctcacaggcactaatggagagatcattgaagaaaatcaacaacaatattaggacctgaactcaacacctgaccaaataaatagtcctaatagacatctacagaactcttcatctaaaaaataccataacatacattcttctcatcaccacatggcacatactctaaaattgaccacacaatcagaaaaaaaacaattctcagcaaattcaaaaatcccaaaacgatacaaggcacacacacagtttacagcttaagagaaacacaattcaataccaataaaacaactggaaactatacaattaaataaaaattaaatggcctacacttgaataacttttttggtaaataatgaaattaaggcagaaaccaagaagtgttttgaaacaaataagaacaaaaatacaacacaccagaatctctgcaatacagctaaggcagtgttaaaagaaaaatttatatcattaaatcctcagatcaaaaagttagaaagatctcagtttaacaacctgacatcataaataaaagactgagagcaacaaaagcaaatcagcccctaagctagcaaaagacaagaaataaccaaaatcagatctgaactgaaggagatttagacatgaaaaactacaaaatatcaagaaatccaggcattaaatctatttaaaaaaagtaaataaactatgagctagattaatgaagatacaaataaacacaattagaaatgacaaaaagagacattaccactgaccccacaaaaatatactgaagtctgctatgcacataaaaaaaaaactagaataaaaaaattattgaacaaatacatcctcccaaaactcaacacacacacacacacacacacacacacacacacaaaatcaaagccctaaatagatagataagctcaaaaaactgaattagtaataagtagcctaccaactaaatgaagctcaggaccaaacatactcacagctgaattctaccagatgtacaaatagaagctgatattatttctaccagaacaatttcaaaagattaaaaagaagaaactcctccccaactcattatgtaagaacagcaatcattctgataccaaaacctaacagagataaaacagaaaaaggcaacttcaggccaatatccttgaaaattgatgcaaaaatcttcaacaaacagctgggcccggtggctcatgcctgtaatcgcagcactttgggaggccaaggtgggttgattccctgaggtcaggagttcaagaccagcctggccaacatgatgaaaccccgtctcttctcaaaacaggaaaaaattagctgggcatggtagcacacacctgtaatcccagctacttgagaggctgaggcaggagaatcacttgaacctgggagtcagaggttgcagtgaaccaagattgcaccactgcactccagcctggatgacacagtgagactccatctcaaaaaaaaaaaagaaatcttcaacaaactactagcaaaccaaatccagcagcatatcaaaaacctaacccactatgatcaactatggtttattttggggattcaaggtttgttcaacatacacgaatcaataaatgtgattcatcacataaacagaattaaagacagaaatcacaagattatctcaatagatgcacaaaaagccttcaataaaatttaacatttttcatgttaaaaaccctcaacaaactaggcactgatggtatacatgtcaaaatagtaagttatctatgacaaatccacagccaaaatactgaatggacaaaacctggaagcattccttcttgaaaactggcacaagacaaggatgccttctctcaacactcctatattcaacataaaattggcagtcttagccagagcaatcaggcaaaagataaaaataaaaggcatccaaacaaaaagagaggaagtcaaactatccctatttgcaaacaacatgattctacatctggaaacccatatactctcagcagaaaagctctttaaactgacaaacaacttcagtaaagtctcaggatacaaaagaaatgtacaaaaattagtagcaaccctatatatcaagaacacctaggccaaatccgaatcgaaaacacaatcccattcacaactgccacagaaaagaataacatatctagaaatacagataaccagaaaggtaaaagatctctatgacaagaattacaaaacaatgcttaaagaagccagagatgacacaaacaaatggaaaaccactttatgctcatgaataaaaaagatcactatcataaaaatggccatactgcttaaataaatctacagatgtaatgctaattcaatcaaaccaccaaaatattttttaacagaactaaaaaaacaactattttaaaattcacatggaaccaaaaaagagcctgaatagccaaggcaatcataagcaaaaacaagaaagctggaggcattacattacctgacttcaaactacacaacagtgctacagtaaacaaagcaacatggtactggtacaaaaacaaactcataggccaatgcaacagaatagggagcccagaaataatgccacacacctaaaaccatctgatcttcaacaaaggtgacaacaggaatgtgggaagaatttcctatttaataaatggtgccagaataactagctagcactatgtagcagactgaaactggacccttttataacaccatataaaaaaatcaactcaaggtaaatgaaagacttaaatgttaatcttaaaaattataaaaaaaaaaaaaacaaaaaaccctggaagataagaagtgccattctagacatagaaactgtcaaagatttcatgatgaagatatcaaaagcaattgcaaaagttgacaaatgggacctaaataaactaatgatcttttttcacagcaaaggaaactagcaacacagtaaagagacaccctacaaaataataggaaatatttgcaaactatgcttctgacaaaggtttactatccagaatccgtaagaactaaaacaagtttacaagaaaaaaaaaaactaacttaaaagaagaccaaaaaaaaaacatgaaaaagatgtttgtcttcaaaaggagacaaacatgtggctaacaagcatataaaaaaatgctcatcactaatcgttagagaaatgcaaaagaaaaccacaacaagaaatcatctcaaaccagtgagaatggcaattattataattcaaccattgtgaaaagcagtgtagtgattcctcactaaactaaaaataaaattaccatttgacccagtaacctcacaacggggtttatacctaaaaatatataaattattctatcataaagacacatgcacaatcacattcgttgcagtactattcacaatagcaaagacatggaatcaacctaaatgcctatcaatggtagactggatacagaaaatacggtatggttgggcatgatggcacatgtctgtaatccagcactttgggggctgagccaggtggattgcctgagctcaggagtttgagaccggcatggacaacatggcaaaatcccatctattaaaaagaaaaattagctaggcatggtggcacaagccttcagtcttagctacttgagaagcttagatagaagaggattgtttgagcctgagtgggtgagtttcagcgagccaagatcacaccactgcactgcagcctgggaaagaaagtgagaccctgtctccaaaaataacaaaaaataaaaaacctaataaaaacaaaatatgggccgggtgcagtggctcacacctgtaatcccagcactttgggaggccaaggcggcagatcacctgaagtcaggagttcaagaccagcctggccaacatggcaaaaccccatctatactaaaaatacaaaaattagctgagtgtggtggcacacgcctgtaatcccagctacttgggaggctgtggcagaactgcttgaacccgggaggtggaggttgcagtgaactgagatcatgccactgcactccagcctgtgtgatacagtgagattccatatcaaaacaaacaaacaaacaaatatggtacataaacatcatgacatcatgaaatactgtgtggccattaaaaaaaaaaaaaagagtatgtcctttgcagcaacatggatgaagctggagatcactattcttagaaaactgatacagaaacagaaaaccaaatgcatgttattatttataagtaagagataaataagaacacatgaacacagaggggaaaaaagacactgaggcctagttgagggtgggaggactaaaagggtcagaaaaagtacatttttggtgctatgattagtactgcagtgacaaaataatctccacaccaaactcccatgacacaattttagctgtataacaaagctgcacatgtacccctgaaccacccaaaaataaaagttaaaagaaaaaaatccctcgattggagagagtgcaatgcaggtggaaggactggtttgtgctatagatagtggcccaggtggggctgtactctgattcatttctgggtccatgcagccagataagattatgaatcctaggctggtggagaaaacaggatgctactgcagattccgtgtctgaaaatagggatatgccaggagacttgtagacacttttgtaggtttttggccaaaaaaaccactaggatcaaaaatgctgtggtaaaattcctgagggtggtgccttgtccagagaggggtgtggacacatcaatgtctagtgggtgtttgtgagtgggtggaaatcctctgctggcagctgtggcaaaagggggtttgtcatcagatctcctttaagttttcagtcttctgtcaccctgggaggagacctggaatcaaagaacaaggggcagtgtgacagcctgtgtagaggagagcagagcttcccattcccagacacccggagtttcattctaggccaggagtctgtgatatctttcttctggcaccaaatctgcagagtttgatgaacaccaacaattctccaacagcaactcattgtctaacacttgaattctgacaccacccagagtcagcacagaccctgattcagggctcagtcccacaacattgtcctcactgcagatgccagtcacaaaccccatgggctcatctatgcttctgacctactgtttaaaaagtggggactcccataacctttttgaaattcagtaatctgatacagctactcacagaactcagcagaacactgtagttatattcactggattcaaataaaatatacaacccccaaaaagtcaaatggaagaaaagtatagaaccaagaaaaaaggtgggaaaagatgaagcatatagataacaaacagctaggattaataaaattctctatcctctgtgttctccaggaacacttatgaaaagaaacacccttcccattgtgacttagatggtgctctcttttcttacctactacacagccaggaaaacactctgcatattttcttttctcgttaaaaaaatcagctgtatttgtcttcagtggtcaacataaaatacttcttaatcaaacttcacttattttcttcccacaggctcctgaactctgagctactctcagtccgagccaccatacaacctcattttatgctactgcagattcagtgtctgaagaacactcctaagaacacactgacttcagggtaaaacattctctgatctaaaatctgattatttcacccttcatttaaatattcccctcaccttctttctaatcttatttgttttctctaggaaaaaaaggccttttctacctaatctttataatccttaaagatcttatagttggtacttcctcctgttgcaatactcctttggaattctttttttttttttaatgtacatctagctggttattttaaaacctctcaaaactgcctcaaaacagtaacaattttatcttcaataagacactcccaaaccccttctatcttaaccttaactgcatctgcctgtggggccccagctttccagggctctgtagcttctctcactatagaggcttcttccatggctgcggtaagcaggctgggacatctgcaggaaaggctttccagaaggaactaaatgggcctttaataacctccgtttgctagctcaaaattaaccttagcttgcagtcattgggctcaagctttaattacatgtcagagtcattcacttagtttttgaaactaagtgtttgaaaaatccagcaaaatgattcaaaaacagtgttcatataagaaaattttaaggtgcttaccttttgtacctcagtaagagaagcaaatgtatttatttcttttggacaataaagcattattttattttttgtattaaaaatcatgaggtaaacagttatatgggaacacttctaggaggtacctagtttcatcacataaaatttaccattaaactcagaaatcaaaataacaggatatagaacaaagatacttacttttgcaaatttaccctgcaaaaaaagaaactgatgttttcacgaatctatgtaactcaccaattatctaccacattttcttgtggaaatatattaattctctatagccaaaacggaagaaaaaatgttcttatttttttcccaaacattccaaaagctagatggaattgtttgaaatcactcagctataaaaagcacacctgagggcagggcgcagtggctcacacctgtaatctcagcactttgggaggccgaggcaggtggatcatgaggtcaggaaatcaagaccatcctggctaacatggtgaaacaccgtctctattaaaaatacaaaaaaattagctgggtgtggtggcgggtgcctgtagtcccagctacttgggaggctgaagcaggagaatggtgtgaacctgggaggcgaagcttgcagcgagccgagatcccaccactgcactccagcctgggtgacagagcgagattctgtctcaaaaaaaaaaaaaaagaaaagaaaagaaaagaaaaccacacctgagaaaactcctaaattcactctgagaaagaaaaaggtgaatgagaattttcaacaaatgaaatatataattagatattattttttgatactcacctttttatgccctttgtaaatattttcttacctttcaagccctactaataagatgcaatttacagttaaaaaactgaggtcagccgggcacagtggctcacacctgcaatcccagcactttgggaggccaaggcaggcagattacttgaggtcagaattttgagctcaaacagcctggccaacatggtgaacccccatctctactaaaaatacaaaaagtagccaggtgtggtggtgggcacctgtagtcccagctgcttgggaggctgaggcatgagaatcacttgaacttgggatgcagaggttgcagtgagccgagattgcaccaccgcactccagcctgggcgacagaggaaaacactgtctaaaacaaaaaagtccgtgtgcggtggctcacgtctgtaatcccagcactttgggaggccaaggtgggtggatcacgaggtcaagagttcgagaccagcctgggcaatatggtgaaattccatctctaccaaaaatacaaaaattagccaggcatgtgggtgcacgcctgtagtcccagctacttgggaggctgcggcagaagaattgctttaatccgggaggcggaggttacagtgagcagagatcatgccactgcactccagcctgggcgacagagggagactccatctcaaaaaaaaagaagaagaaaaaaaactaaggtcaaaataagtgaacaaatcatttaatcgtttcaaggtagagatatgtctgattcatgtgtcaagtcaggtcatccaattactgagagattcagccaccccatcctgttcacttaagtgctcaataatcattctctcaggagactctgaactatgccccagtgagtgccccaggtacattttactttgcaagttcttgcaccatctcactggggtcagtttctttttctttgtctttggagtgctatttttttccacaaactttttaccatttttctttcactatttttctgtcccctaggagaatccagaggcaaaaattattttggtttccccttcaataccggcatctgattgtctgaacagcaatgtgtctccaagaaatggaagctgggttgggtaaagacaatactaatacctcaaggggttagctttccaaaaaaacagggcaccagtagatgcctctcagccccagggcattcacctgctctcctgaaaggctacattccatacctcgggttgtcctacaggagatgagaggctacactccatacctcaggttgtcttatgaaagataagaggctacactccatacctcaggttgtcttatgggagatgagaggctacactccatacctctggttgtcttatgggagatgagaggctacactccatacctctggttgtcttatgggagatgagaggctacactccatatctctggttgtcttatgggagaaaatgacccaggagctgatattcactagatactcttgcagacacagccatggccagtatcttggtttttccccagacagtactgaatctcaggtccaaggaaaaaactgaagggtggctgaggacacgtctccctataacttttccaaagggaaaccctgacccaaaaaacattctgataagatatctgtgtctagggaaactagaagaaaaaaacatttacaaacagaaaacaaatctttttaaatgtgccatcaaatgctttgtcaaaaaatgattacaataggtatcaaaatgtacactaaaggacaaatagttgatcatgtgaataagggaggggaaactggcatttgggaatgtcagaaggaactggaaattaagtattttactgcaagtcagagtcaggctggagaaatagggggtggcagatagacttgaggccctgcttgggacacatgtgaaaaatgcaaggaaacagcagttccctgtggggtgtgaaaataattaagtggctggcagttagactgaggaggctttatttcctaatttctacttttaaaaaatctaattcggccaggcgtggcggcttacacctgtaatcccagcactttgggaggccgaggcgggtggatcacttgaaatcaggagttcgagaccagcctgaccaacacggtgaaaccccgtccctattaaaaatacaagtggcacatgcctgtaatcccagctacttgggaggctgaggcaggagaatcgcttgaacctgggaggcggagagtccagttagcctagatggcgccattgcactccagcctgggcgacaaagtgagacttggtctcaaaaaaaaaaaaaaaaaaaatctaattcaaatgtattttttttaaattactacattgggggaaaaaaattcaggcttaacacactataaactgccaattaacctctgattacataaccaagaaatttccatcttcatgttacaaattaagaaaccatgaggctgggcgccatgactcacacctataatcccagcactttgggaggctgaggcgggtggatcatgaggtcaggagatcgagactaccctgactaacacggtgaaactccgtctctactaaaaaataccaaaaaattagccgggggtgttggcgggcacctgcagtcgcagctactcgggaggctgaggcaggagaatggcgtgaacccgggaggcggagcttccagtgagccaagattccgctactgcactccagcctgggcgacagagcgagactccatctcaaaaaaaaaaaaaaaaaaaacaacaaaaaaccaggaaactacataactgtacctaaccaattattgaatgtggttttcttcattatgcaccttataaaactctttccatcaaaccccttcaatagaccataaactacaatccatagttgggtgctctacaattttggaatcactcttaaattatttaatattttttcggcgacttccataaatttttaatgggagaatacaggaactgggagcctcacggaccaaagctcttcccattcatgaacccacacctcaagtcaggattctcctctgactaccctcccacagtccgtgcacaatctgggagagactccgcgctgagggtgcagagctgccccaagagggctccaggccagggcacaatcacagcgcagggaagagacaggacgcccggcggcccgcgcagccgccatcttatggctgaaggggactgaggtcgagctaggcaaggagaacttgtggagctgactgcgggtaggcttgagtcccgccacagccacttcccgccggttccaaccagcccaggccactctctcagtgtgtcggacccggcacactcaccatttctaggcttccagggggtcctggcgacttagttgtggatctcccaatacctgcaggtcatagggccacagaggctgggactctaggaacagtaaggacaaggcctttacctccggctgcagcgagagacaaaggaccgaccacatcccggaagccgacctgtccccccccccagctgcctgcctgattggacattcccagcccagcatccctgattggataatgtttaaggccccgccctttcaggccctgagtgacagaagatgtgatcagatgctgggctgaatgaagaaagagagccaacgtaggctgcagccttttcaggcagggcttcctccctgagctgagccaggcctaccccagagcatgggaaaattctatctcttctttattctctctttttaaatgtatttgaaatgtgaacaaatatattttactgtcatgttaataatacataaaacttttgtacaagagtaaatcaatttttactttagtaatagtgtattatcaatactaaaggctgggtgcagtggcttacgcctttaatcccatcagtttgggaggccgaggcgggtggatcaccggaggtcagaagttcaagatcagcctggttgacatggtgaaaccccttctctactaaaaatacgaacattagtcaggtgtggtggtgggcgcctgtaatcccagctattcaggaggctgaggcaggagaatcatttgaacccgggaggtggagattgcagtgagccaggatcaagccattgcactgcggcctgggcaacaagagtgaaacgccagctcaaaaacatgggcaacaagagtgaaacgccatctcaaaaaacaaaacaacaaaaaagctaaacctaatgttagtaaaaccttataaataaatccatgaaatttgtcatttttgaacactctagatgttcatatatattttacaatctcatatttaactttttctattttattttaatagcctttttttttaacttgaaacaaccttaagctgttttttgagacgagtcttgccaggctagagtgcaatggcatgatctcagctcactgcaacctccctctctgggttcaagcgattctcctgcctcagcctcccgagtagctgggattacaggcgcccaccaccacacccagctaatttagcatggtagcctcaccctgtagtaccagctattcgggggctaaagtaggaggattgcctgagcccaggaggttgtggctgcagtgagccctgatcaagccactgcactccattctgggtgacaagagtgagactctttctaaaaaaaaaaaaaaagccaaaacatataaacttaaacttatgggagtttggaggtttttatttttgtcttaaattattatatttcaatagttttggggtacatgtagtatttggttacatggataagttcctaaatcttttctgagatttaggtgcaccaatctcccaagcagtgtgcactctacccaatgtgtagtctttcatccctcaccccctctcctacccttcccactgagtgcccagagtccactatataattcttttttttaattatatttatttattgagacagagtttcgctcttattgcccaggccggagtacagtggcgcgatctcagctcaccgcaacctctgcctcccaggttcaagcgatgctcctgcctcagccttcccgagtatctgggattataggcatgtgccaccatgcctggctaattttgtagttttagtagagacagggtttctccatgttggtcaggcttgtctcgaactcccaacctcaggtgatcgcccacctcagcctcccaaagtgctgggattacaggcgtgagccaccgtgcccatccccattacataattgttatgcctttgcatcttcatagcttagctcccgtttataagtgaggaaatacaatatttgggtttgtatcccctagttcttttttccttttttttttttgagatggagtttgctgtgattacaggcataagccaccgtgcctggcctattttttgatgttttaattatggtcttttctgtttgtttgtttgtttgtttgtttgtttgtttttgacatggagtctgtcacacagactggactgcagtggtgcgatcttggcttactgcaacctccacctcccgggttcaagcgattctccagcctcagcctctggagtagcagggattacggacacactccatcgcgccctgctaatttttgtatttttagtagaggtgaggttttaccatgttggccaggctagtctggaactcctgacctcaggtgatccacccgtcttggtctcccagagtgctgggattacaggcatgagccaccatgcccggccaatgatggtcattcttgcaagagtaaggtgatatcacattgtggttttgatttgtatttccctaatcattaatcattagtgatgttcagcatttttttttaatgtttgttggccatttgtatatcttcttttgagaattgtttaagtcccatctgtctttgtttttgttgcatttgctttgaggttcttggtcatgcactctttgcctaagtcaatgcctaggagagttttttcaatgctttagaattcgggtagtttcaggtcttagattaaagtatttgatccatcttgagttgatttttgtataaggtgagagatgaagatactttttttttatttttatttttttgagacggagtctcgctctgttcccaggctggagtacagtgtcatgatctcggctcactacaacctctgcctcccgggttcaagcaattctctgcctcagcctcccaagtagctgggattacaggcacctgccaccacacccagctaaatttttttttttttttttgtatttttagtagagacggggtttcaccatcttggccaggctggttttgaactcctgacctcgtgatccacccaccttgacctcccaaagtgctgggattacaggtataagccactgcactcagccgaagatccagttttattcttcaatatgtggcttcccaattatcccagtaccattctattcaatagaatagggtgttatttccccacttcatatctttgtttactttgtcaaagatcagttgactgtaagtatttgggtttatttctggtttcactattctgtttcattggtcttcatatctatttttatacccatacaatgctgttttggtaactataaccttgtagtatagtttgaagtcagataacgtgatgtcttcagatttttttgtgtgtttttgattttgttgttttgttttgttttgttttgttttcctagtcttgctttgactatggaggctctctttttattttatataaattttaggattttttttttttagttttaggatttttttttttttggtatcctgaaattttactgcatttatgtatcagatcgaaaagttttttgttttgtttttttttctttttgagacaaggtcttactctgtcacccaggctggagtgcagtggcatgatcttggctcactgcaccctctgcatcccaggttcaagtgattctcctgtctcagcctcccttgtagctgggattacagccacttgccactgcaaccggctaatttttgtattcttagtagagatggggttttaccatgttggccaggctggtcttgaactcctgacctcaagtgatccacctgcctccatgtcccaaagtgctgggattacaggcttgagccactgcatccagccctaaaagcttttttagttgagttttagggtttcccaggtacacaattatatcattggtaaacagtgacaatttgacttcctctttaccaatttagattctgtttattttttgctttactctgattgctttggctaagacatccattactgtgttgaatagaagtggtgagagtgggcattattgtcttgttccagttctcagaaaaaatcctttcaactttttcctgttcagtgtaatgttggctgtttatcacagatagattttttttttttctcggacggagtctcgctctgtcacccaggctggagtgcaatgtcaggatctctgctcactgcaatctccacctcccagactcaagcgattctcccgcctcagcctccccagtagctggcaccacaggcacccaccatcatgcctggctaatttttgtatttttgaacagacgaggtttcaccatgttggccaagctgatctcaaactcctgacctcaagtgatctgcccacctcagcctcccaaagtgctgggattacaggcatgagccaccacgcccagcctgtcatagatggtttttatgaccttacaatatgttccctctatcccgattttgctgaggattttaatcataaagtgatgctggattttgccaaatgatttttctgcatatattgagataatcatataatttttggttttaattctgtttatttggtgtataacatgtattgacttacctatgttaaatcatctctgcatccctggcataaaatgttcttgattatggtgtactatcttattaatatgttgctgtgtttggttagctagtattttatggaagatttttgcatttatgctcatcaggaacattggtgtgtagttttcttttattatgtcttttcatgatcttggtattagagtgatactggcttcatagaataatttaggaaggattccctttttctctatcttttggaatagtttcagtaggactggtaccaattctttgaattttggatagaattgagctatgaatccatcttgtcctggacgttttttgttggcagtttttttttttttttttcttgagtcttgcgctgtcacccaggctggagtgcagtggtgcgatgttgactcactgcaaacttgcctcctgggtttaagtgattctcctgcctaagcctcccaagtagctgggattacaggcacaaaccaccatacctggctaatttttgtatttttagtagagatggggttttgccatgttgatcagactggtctcaaacacctgacctcaagtgatccccccacctcgtcctaccaaagtgctaggattacaggcatgagccactgaacccagctggcaatgttttattactagtttaatcttgctacttgttattggtgtgttcagagtttttatttcttcctgatttaatctaggagggttgtatatttccaggaatttatcaaactcctctaggttttcaagtttgagcatgtaaaggtattcgtagcagctttgaatgatcttttatttctaattgagcatatttggatcttctttctgcttttctgggttaatcttactaatagtctatcagttggatttatcttttcaaataactagcttattgttttatcttttatattttttaaaatttcaaatttatttagttcttctctgatctttgttattatttttttttcctgctgggtttgggtttggtttgttcttgtttctcttgttccttgaggctaaacaatctcaggttgtttattgtggttttttgaactttttgatgtatgtatttaatgctatgaactttcctcttagcactgcttttgctgtatcccagatgttttaatatgttgtgtcactattattcaatttaaataattatttaatttccatcttgatttcattgtggaaccaattattcatgagcagtttatttaattttcatgtatttgtatggttttgagtgttcctatttgaattgatttctaattttattccactgtggcctaagacagtacttgatataattttaatattcttaaatttattcaggggctgggcatggtggctcatgctttaatcccagcactttgggatgccaaggcaggtggataacctgaggtcaggagttcaaaaccagcctggtcaacatggtgaaaccccatcgctactaaaaatacaaaaattaggcaggcatggtggcacgtggctgtaatcccagctactcagaaggctgaggtaggagaatcccttgaacttgggaggcagaggttgctgtgagctgagattgcaccattgcactccagccttggtgacagagcaagactgtcacaaaaaaaaaaaacatcagacttgtcttttggcctattatatggtctatcttgaagaatgttttatgtgctgatgaaaagaatgtatattctgcagttgttgggtagaatattctgtaaatctctgttaagtccatttgttctaaggtgtagtttaagaccattgttttttgtttgtttgtttgtttgttcatttgactttctgtcttgatgatatgtctaatgctgtaagtaaagtaaaaaagtcccccaatatttttatgttgttgtctctctcattgcatttcttaagggacaacttaggtgaaacaagaaaatttatacttctgaagcacagaactaacattttaggctaaaatatattttttttttctttgagatggagtctcactctgtcgcccaagctggagtgcagtggtgtgatcttggctcacttgcaacctccacctcctggctcaagtgattctcctgcctcagactcccgagtagctgggactgcaggcacctgccaccacgcatggctaatttttgtgttttttagtagaaacaaggtttcaccatattggccaggctggtttcaaactcctgacctcaggtgatctgcctgcctcggcctcccagagtgctgggattacaggtgtgagccactgtgcctggccttaaatgtactgtttatgttttttttaatatataagattaaatgatttgcaaacagcaactttttatttatttgtcttcaatttcaatggctttaaacaatttttttgcctagttcttctgccatgtacttccaggtttatgttaaagtagaagcattgacaatggggacaatatagttttgcattgcattggtttttgtaaatttcgtggagcaaaagcctgttcaagtttatataaactggttacaaggggtaaaaatcttcttctgttgggcccccatatttataggatgccctctttatttgtaatagagagaggtggtaaacgcagcaaagcagctgcgtctgcataggatttacctttagttggcttgttacaaaaggcttgggtagttgtaattcccattttattattgaacagattgaatatccttcaggactttcatctgtagagcagacactaggggaagttgttgcagtcagatctgcatatggtggggcttacatcaggatgtggatgaggatgcctttcaccaagtactagagagggtcttcccaggtcactgtgtgggattctacctaggcagaattggccataaactgtggattggagttagaactaaaacattaaactgtatggctacaaatgggtgtcttcctccaggcctctggaagggcagaagctctcccaggctgtggctgggaggagtttggaatggttataggataagttcagaattctcagtgggagcaagttgagttggctattttttgggttgtggccaagaacagaaatcctgtagtttgccaccttagtggaagcctgtctcctgaaaagaatgttcctcaatcttgggctttagcagagtttcacaactccgtccctggatctcaaagctcttttgaaggtacttgttttagagatgaagtctttctacataacacaggctggtcttgaaatcttggcctgaagaaattcttcaacctgaatgttttatgtagctatcattacagatatgagccaggatgcctggatctctcataaacacatttttgtcagggctggctcacagttttcttgctgtcgggggataagaaaataggtcaccttttttttttttttaaattttactgatgtcgctctccctatacatttttactttgtatttcctatttcaaatttctctgttattttagattcagacatttaggataatatgttagaatttacatgttatgcctgaaataaattagattattagtaggcattccttatttactaaaatatttagttataaatttaagtttgctgcaggcagaaaggaattatatgatttccattcactttcttcagcctatatttaaataataaaataagttcttccctgataattgttttatatatcagaggctttaattatattctgcagactttttttttaatttaacaaagtaagactattctttgcttctaaagttaaattacagcagtttcattttgtgtaagaatagcacatattctttaagaatatatgtagcatatattgtgtaagaacagcatatataacgatgaaatttacctctagttttctttagtgcttatttattaaaagcttatcattagaatcttctatttatgattatactgcaatttctcttaagttttactgccatgcagtgcatgccgatgactcaaaatacctgccttccatgagtacacagacacagtcaaatattgtagttatctagacaaatttttgtaatggtacatcaatgttgcatactagatctgatgagtaaacatttctgttattattattttgcagttctatatgtgtgctttttagcgtcagtttcttaatatcagtgaattttttttgttttacgtattataattctagacaatttgcaattctgtttgtacactttaagtcaatgtggggtttaattgagaaataaattagccatatgtctatcacaatcagattatatatttgtgtgtttttatctataaatatgactccaattatggttatggcttatcttgtatatattctttcttagctgattttcagtggttgttttatcttgtctaagtgagtagttgtggaaataatcttatttttgccttgtgtttaataatgaatatatattttctttgtgtgagagaaacacttttgtgatttgaaggtaattctagaaaagatttataattcttcatttagtttttcttctaaaataatttttgtaaaaacagataacataaaattgattctctaaaatctatttaagtgtacattttatggccaggcatggtagtggctcacctctgtgatcccagaaattcgagaggtcaaaacagaaggatcacctgagcccaaatgtttgagatcagcctgggaaacatataaagacctgctgtatccaaaaaaattttaaaataacaagccatggtggtgtgcacctgtggttccagcaacctgggagatcaagggaaaaggagtactttatcctgggagtttgaggctgaagtgagccataattttgccactacacaccagtttgggtgacaaagtgagaccctctgtcaaaaaaaaaagctgtggatttcaggcatgttaaagtatattcacctggttatgcaaaaggcttctagaggttttacatcttgtaaaactaatactcaatacccactaagtaacaactgcccattttaccctctctccagcccttggcaaatatctttcagctttctgtttttatgagtttggctatttaacttatctcaggtaaatgaagtaatgtagtattcatcattttgttactggtttatttcatgtgacatagtattttcaaagtttatcttaaaatgtgacaaaattttctcttttaaggctgaatgatattccatgtatgtgtatgttaaattttttgatgtatttataaatcaagggacatatagattacttcagccttttggcttttgtgaaatctggtacaataagcataaatgtttacatgtctcctccaggttctgtgttgcatactttggaaatcaatttataaataagattgttgtaattgattacaattttatttttaattatctgaggaacatttataacattttaaaataatggctgcatctttgttttccaccaacaatcagcataggtttcattttcatagcatcaccaatagatctggttttcttaaaaaattgatagtggccgttccaatgggtgtcaggttattttgtatttcactgtgatatttatgcattcctctacaaattagtaattttgtgagtcctgtcaaatgctcttcccatttatgcttttgataaaaatttagtttaattagttttccatttctaaatcctgttattcaactttattgttcagttttaagagttgcttatatattctgaatattaacttctatcacatgtgatttgcaaatattttcattgatttcctaagtggcattgtcactctcttgaagttttttttgatgtgcaaaaattttgaagtatatttcagttaaatttttctgttcttttcattgttgcttatgcgtttaatgtcatctaagaaaatgattccaaggccaatgtcatgtcttttctccatgtttttttaagacacttattagctattttttatatctaagtattttatataaatttttttgtctatggttcaaggaaagaatccagctttatcagtatagatattcagttttcagcattaatttttgaagatattatcttttctctattgtgtgctcatggcagctttgtggaagatcattatttacagaagggttcatttctgggctctctattctgatttatcatctgtttatctgtctttgtgtcagtactatattgttttcattatagcttttaatatgttttgaaatgggaaagtttattacctcctctatttcatgggtgtttggctagttatagttaataatcaaattttaaaatgttaaataatatttctgtttaaaaatcctgtgctattaggaattttatagaaattacgtcaaatttgtttaccactgtaggttgtactgacatcttaaaaaattaaattttttgactcttgagcaagaatatgttaaagagtgttttatttttattttatttatttatttattttatttagagagagaagggatcttgctttttttttttcctttgagacagagtctcactctgtcatccaggcaggagtgcagtggcacaatctcaattcaacacaacctccaccttctgggttcaagtgattctcctgcctcagcctcctgaatagttgggattacaggcactcaccaccatgcctggctcatttttttgtatttttagtagagacgaggtttcaccatgttggtctggctggtctcaaactcttgatgtcaggcaatccacctgcctcggcctcccaaagttctcgggttacagaggtgagccactgcacccagctcatgtgtttaatttttatatacttttggattttcctgttttacttttaccttaggttcaaataatagcatcagcaaatctgtcctgccaaatgaaaagaggaaaacctttcaaaataaccaaattttgaaagagcatactggcactgcatatgccctataaagaatgctgaaaagcatcccacttattctaaaattgaccacataattggaagtaaaacactcatcagcaaatgcaaaagaatggaaatcataacaaacagtctctcataccacagtgcaatcaaattaaaactctggataagtaactcactcaaaaccactcaactacatggaaacagaacaacatgctccagaatgactactggggaaataatgaaatgaaggcagaaataagtaagttctttgaaaccaataagaatgatgacacaatgtaccagaatctctgggtcacagacaaagcagtgcttagagggaaacttatagcactaaatgctcacaagagaaagcaggaaaggtctaaaatcaacatcctaaaatcacaattaacagaactagagaagcaagagcaaacaaattcaaatgctggcagaagacaagaaataactaagattagagcagaactgaaggagatagagacacaaaacacccttcaaaaaattaatgattccaggagctggttttttgaaaagatctacaaaatagatagactgctagccagactaataaagaagaaaagagagaggaatcaaatagatgcaataaaaaataatcaagagggtattggcactgatcccacagaaatacaaactaccatcagataatactgtaaacacctcaatgtaaaaaactagataatctagaagaaatggataaattcctggacacataccctctgaagactaaaccaggaagaagtcaaatccctgaatagaccaataacaagttttgaaattgaggcagtaattaatagcctaccaaccaaaaaatacctgggaccagacagattcacagccatattctaccacaggtacaaagaggagctggtaccaattcttctgaaattattccaaacaatagagaaagagggactcctccctagctcattttgggccagcatcatcctgataccaaagctggcagagacacaacaaaaaaagaaaacttcaggccaatatccctgatgaacattgatgtgaaaatcctcaataaaatactggcaaactgaatccagcagcacatcaaaaagcttatccaccatgatccagtcagcttcatccctgggatgcatggctggttcaacatacacaaatcaataaacgtaatccatcacataaacagaacccatgacaaaaaccacgtgattatctcaatagatgcagaaaaggccttcaacaaaattcaacaccccattcatgctaaaaactctcaataaactaagtattgatggaacatatctcaaaataataaaagctatttatgacagaccacagttaatgtcatactgaatgggcaaaacctggaagcattccctttgaaaactggcacaagacaaggatgccctctctcaccattcctattcaacatagtattggaagttctggccaggacaatcaggcaagagaaagaaataatgagtattcaaataggaaaagaggaagtcaaattgtctctgtttgcagatgacatgattgtatgttgagaaaactccatcatctccgccccaaatctccttaagctgataagcaacttcagcaaagtctcaggatacaaaatcaatgtgcaaaaatcacaagcattcctatacaccaataacagaccaacagagagccaaatcatgactgagctcccattcacaattgctacaaagagaataaaataactaggaatacaacttccaagggatgtgaaggaccttttcaaggagagctacaaaccacagctcaatgaaatagaagaggacacaaacaaatggaagaacattccatgctcatgataggaagaatcaatatcatgaaaatggccatactgcctaaggtaatttatagacccaatgccatccccatgaagctaccaatgacttcacagcattggaaaaaactactttaaatttcatatggaaccaaaaaagagtccacattgccaagacaatcctaaacaaaaagaacaaagctggagacattacagtacctgacttcaaactattgtaaaaggctacagtaaccaaaacagcatggtattggtatcaaaacagatatatagaccaatggaacagaacagaggcctcagaaataacaccacacatctacaaccatctgatctttgacaaacctgacaaaaaacaagaaatggggaaaggattcccaatttaataaatggtgttgggaaaactggctagccatatgcagaaaactgaaactggaccccttccttacaccatatacaaaaattaactcaagatggattaaagacttaaatgtaacaccccaaaccataaaaaccctagaagaaaacctaggcaatgctattcaggacataggcatgggcaaagacttcatgactaaaacagcaaaagcaatggcaacaaaagccaaaattgacaaatgggacctaattaaactcaagagcttctgcacagcaaaagaaactatcatcagagtgaacaggcaacctatggaatgggagaaaaattttgcaatctatccatctgacaaagggctaatatccaggctctacaaagaacttaaacaaatttacaagagaaaagcaaccccatcaaaaagtgggcaaaggataagaacagacacttctcaaaagaagacatttatgcagccaacaaacatatgaaaaaaagctcactgtcactagtcatgagagaaatgtaaatcaaaatcacaatgagataccatctcacaacagttagaatgtaatcattaaaaagtcagaaaacaacatatgctggggaggatgaggagaaataggaacactttcacactgttggggggagtgtaaatcagttcaaccattgtggaagacaatgtgacaattcctcaaggatctagaatcagaaataccatttgacccagcaatcccattactgggtatatacccgaaagattataaatcattctactataaagacacatgcacacgtatgtttgttgcagcactattcacaatagcaaagacttggaaccaacccaagtgcccatcagtgatagactggataaagaaaatgtggcacatatacaccacggaatactatgcagccataaacaaggatgagttcatgttctttgcagggacatggatgaagctggaaaccataattctcagcaaactaacacaagaacagaaaaccaaacactgcatgttctcactcataagtgggagttgaacaatgagaatgcatggacacaaggaggggaacatcacacactgggacctgtcagcgggtggggggctaggagatgaatagtattagaagaaatacctaatgtagatgatgggttgatgggttcagcaaaccatcatggcacgtgtatacctgtgtaacaaacctgcacattctgcacatgtatctcagaacttaaagtgtaataataaaaaaggaaaaaaaagaatgctgaagagtttcttttattgaaaataaaatgactcaagaaaatgacacataatcatatctatatatgaatgcatatatatgtgtatatatatgtatgtatattatatatatgtatgtgtacatatatatgtatttgtatatatatatatttttttgagccgagttttactcttgtttcccaggctggagtgcagtggcctgatctctgctcactgccacctctgccttccagtttcatgtgattctcctgcctcagcttcccaaatagctgagatcacaggtgtccgccaccacacccggctaattttttgtatttttaggagagatggcgtttcaccatgttggccaggctggtctcgaactcctaacctcctgatctgcccacctcagattccaaaagtgctgggattacaggcatgagccactgtgcctggccaaaaaaaaaaggggggattattttcttggatagatattcacatacaaaaaaatgaaatttcttagcataatcataatggtgcagaaaacatttttaagtattttctataatttgaaaaaaatttagaaaacaatgaaaattttgagagtaaaatctttgtatgcaactgaagttcatcttctaccaggttaaaatgtagttatatcttttagaagttttatgtaatttccaaagtaccacaaggtatcacaaaaaaaaatctgtatagatatgcaaaacaaaataaggaaaaagtaaaagcatatcagtacaaaaatcaaaacgacacaaaggaagacacagagagaaaattagagacaaagatacaacaatcaaatgaaacaataaaataacattattaagtctttctgtttcagaaagttatttaaacatgtatataaaatgaacttaattcagagacatacatttaataaaggaattagataattttaaaaaccaagatgcaacttgcctttctataatagagtcatcagagatctaatgataaaaaagactgatagtggcaagatggatgtagatattctatgcaaatattaattaaattagagcagaagaggtcaaaataatgttactttagctgtatctttatttatttatttattttgagatggagtcttgctctgtttccaggctggagtgcagtggtgtgatcttggctcactgcaacctctgcctcctgggtccaagtgattctcctgcctcagcctcccaagtagctgggactacaggcgcgtgccaccatggccagctaatttttgtattttcagttgagacgggttttcaccatgttggccatatagtctcgatctcttgaccttgtgatccacccgcctcagcctcccaaagtgctgggattacaagcgtgagccaccgcgcctggccttgagctctatcttaagtcaaaaaccgtcatattttataaaatgtttttttaagtcaaaactctacagagacaaaacaagccattacaaaataatagatttatttactgggaacctataacaaatttgtatatctgtgtgtgtgtgtgttttgtgcaagtgtgtgtatgtgtatctcacattaggcttgcaaaatatataaatcaaatattgacagaattgaagaaacacatagagaacaatatagttacaatagcatatttcttttcttttcttttcttttttttttagacggagtctcgctctgtctccaggctggagtgcagtggtgtgatcttggctcactgcaacttccacctcccaggttcaagtgattctcctgcctcagcctcccgagtagctgggagaacaggcgtgcactaccacccccagctaatttttgtatttttagtagagacagggtttcaccatgttggccaggatggtcttgatctcttgaccttgtgatctgcctgccttgtccttccagagtgctgggaatacaggcatgagccaccacatccagcctacagtagcatatttcaataccccattttgtataataaaaataaaaccagacagaataatagtaagagaacagagaacttgaagacaagtataaaacaatcattcctaacagaggtatagagaacactcctcaacaatatcaggatacacagccttcccaacagctcataaaacattctgcttgatagaccacctgttaggccaaaatagaagtcttaacataatttttaaaactaaatttatatggattactttctatcaccaaaatgaagtgacagtatgaaacaataatagaaaaaaaaacctgaaaaaagtataaatatatagaaattaacacactatgagcatgctcctgttcaaaggttgagataaatattttgaagatatccatactgttcaatgtaaactacagatttaatgcaatgttctttaaaagttcacactacattttgaagaaatagacacagcaactctaaaagtatatggaatctaatgagacaataaaatacccaataatcttcaaaaaaagaaataatgttaaaggcattacagttcctgattttaaaactcattacaaatctacaaaattaaaacaatttggtgtgagtataaaagtaaaaatgtagactaataaaaatcaatgcagcacatatataaaatttaacatatatattcatatgaagaattatttacatgctcataataattgcagcattgttacaaatttttagtagaggccgggtttcgccatgttgcccacgctggtctcctaggctcaagtgatccacccatcgctgccttccaaaccgctgggattacaggtgtgagccatctcacccggcccaatttattttcttttttaaggttttttttctgaaaattttataatattttggatgggaatgtattgccctgttttgtatacattgtaatctttgattgatatttggacattttttaaaaagctacctgtcacaatctttatcacgtagctttgtcctggcatagtctgaaaacaattgtctttgctagagattctgggagtctttcaaacatgttcttaggatgtgtcttgtctgaaatttgttgtttattttttagttaaagaagtttattaatctttcttcttaatagtcttcacttgctacacctgttccctgtctgtggtactgcagtctctctgctgctgtaacatttacctctggtctcagcagacccaaattgtcactccaaagtataccaccatttcattcagcactttgtcactttgtgacctctgtctctgccaccatgaccattttgttcatggacctattgggcaatgacaggggtagctggggaaagatgctgagtgatgtcaacaaaacaggtcatcctatccacttgattatcaaaatcctcctctgctgaggtcacccattggttagcactcacatgggatacaaatatcttcacagtttttgaccactcaggaggtccatccacatacctcttccccaaatttctttgtcaccaatttttcaatggtgcttcttccaagtccctggcaatccagtcaaaccattggctaaagcccatgattcagtatgtaatcacacatctggccattcctccttccatgcaaagtgcacaaccaggtgcactgctcaaaattctgcccactgggaagacttcccttcaccactgtctttcagggatgtcctagaaaggaactgtagcgccacagctgggtccactttcaggtggtgccttcatattatacagaaccgtctgtaaatgaggccatagtcttttcttcctctgtcaaatgatcatagggaactccccattaggtcatcagtgcaggctgggggagagaaggcagggtggcagaaatggagaccatgggcatttgagccacttcctcatgtaacttacttgtgccttcagaacctgctcaagcccgatcacatatataccacatccatttgatgatggaatgctgttgtgcatgacccactttgtggttagatgggtcagaaagcacccagttcatgataggcagttcaggtcgcatagtgacttgataaaacatagtcaaacgttcagtttttaccaaagcccagtaacaggccaagagttgtctctcaaaaggagagtagttatctgcagaaaatggcagggctttgctccaaaatcctagaggctgccaggtgcagtggctcatgcctgtaatcccagcactttgggaagccgaggcaaacagatcacctgaggtcaggagtttgagaccagcctggccaacatggtgaaaccccaagtctactaaatatacaaaaattagccagacgtagtggtgggtgcctgtaatcctagctactcaggaggctgaggcaggagattgcttgaacctgggaggtggaggttgcagtgaggcaagttaatgccattgcactctagcctggatgacaagagcaagactccatccaaaaagaaggaaagaaagaaagaaagcaagagaaagaaagaaagaaagaaagaaagaaagaaagaaagaaagaaagaaagaaagaaagaaagaaagaaagaaaagaaaagaaggaaggcagaaaggcaggaagaaggaagtcaggaaggcaggaaggcaggaagaaggaagtcaggaaggcaggaaggcaggaaggaaggaaggaaggaaggaaggaaggaaagaaagaaagaaaaaaactctagaggcctctgctgtgattcacctgagaaggcttgccaaaggctgcaaatagcatctttatttttcaccgacacctcaagatccattggatctcctgggtaatatggcccaagtggcagagcagcttgcacagcagcctggacctgttgcagagccttcttcttttctggaccacactcagaactggcagctttttgggtcactcaataaatgggccagagtaacacacccaaatgaggaataggttgcctccaaaacccaaataggcccactagacattgtgcctctttcttggttgtaggatgggccaaatgcagcaacttaccttttaccttagaaggaatatcttgacaggccctggaccactggacccctggaaattttactgagctagaaggtccctaaattttagtcagacttattttccatcctctggcatgcaaatgtctcatgaataagtctggtgtgtttgctatttcttgctcactggattcgatcagcataatgtcatcaatgcaatggacaactgtgatatttgcaaaagcaaaaagcgatagaggtctctttgaataagattatgacacaaagccagagagttaatatatccatcaggtaggacagtaaaggtgtattgctggccttgccagctgaaagcaaattgcttctggtgggccttatggacaggaacagagaaaagggcatttgctaagtcaatgtctgcataccaggtaccaggagatgtggtaatttgctcaagcaatgaaactacatctagtatggcagctgcaattggagtcatcacttggttaagcttacgataatccactgtcattctccaaaatccatctgtcttctgccaaatgaaagagttgaatggggatgtggtaggaatcaccacctttgcgtctttttagtccttaatggtggcactaatctctgaaatccctccacggatgcaatattggttttgatttactattttcccaggtagaggcagctctaatggcttccatttggcttttcccaccctaatagccctcaccctactactcagggagccaatgtaggagttctgccatctgctaagtatgtctatgccaattttgcattctggaactggggaaatgaccacagagtgagtcttgggacccacttgatcaactgtaagttggacctgagctaaatttctattaagtacatgacctccataagcctctactttaactggaggaccacagtgatgttttgggtcccctggaatcaatgtcacctcagagccagtgtttaatagtccccaaaatgtccaatcatttccctttccccaatgcacagttaccccataaaaggccagagatctccttggggaaagatgggagaaagattcactgcataaattgtcattagtgtagtgggctcgttcctcaagggaatctggcctctcctttattcaaggagttctgggtctgtaaactggctcaagtctggaaattgattgaggggccatgattctctgtttttatatttaaaattagtcttttttccatttgacctagaagttttctgcttgtataaattaagcaggaatgtagtaggtttcctatcaattttacttctaagatcactgtgatgaatcagccaatgctggaactctacagaagtcagactattctgattgccgtttagcctctgctgtccattacagtagctatgcccaccttgcctttgatggttgagtgccaccacttggcccctgccatcatgggatccaattattcccactgtatttaaattttgtagttgagagaccacggttcccactgttagatctgacatgcagagaaaagtaattacaaggttctttaaagattcaggtgctgctttcacaaatctattttgaagtcagtggtcaagggtatatcttctggactttccatgctggaattagtaggtctaaagtgactaatccactccagtatcccaatgtgcctaagccttttgattcctccctctacattaagccaaggggcatcaggcatttccagctcactcacaggggggccatcttttaatccatatttcagctaaccaagcaaataaactattagaagcttttttaactccccaagctgcaacattaaatgcagtattcctacttagtgggtccaaataaataaattcagcctggttcaactctatgttccttccaccataatcccacacccttaatattcatccccaagcctgttctccagatatctgtttatataaattagaaaactcaagcagttctttctgagtgtagtgtacctcctcatggggcacactctcaaactcacctctagggggccgctgggactttagtctacttatatgcctagaagcaaacaggggtgttgagggtgggtcctgagaagaatcaacattattttgcctggcaactttctcaggggaggccatcacagttgcctcaggcagtgcagggtttatctcagacaaaggtggaaaggctgatggcagcatgcatcagaaaggggatgttgccactactggggatggggaagctgttttttctgacaaaaagctcatcagagtttacaaactcagagcccctagcttcatcagggtcctcccatacgtccccattccaagtggcagggtcccattcttttccaatcagtgtcctcactttaacagtagacacctggtgaggctgtgcatacatctttcattgcaggtcagtcactaacataataagagtttgtgtgtgtttttccacaatttcatctacaggagatgagactctcacacagggcaatcttagcagatttgaggctcagtaactgcttctgaagccaaaagatagaatgcctgagttcatcattttctatcatcactttgtccattgaacttaggacaaccagcttcattatgttccttggttctccacatatggtcaaacctccacctcccagtttcaagcaattctctgcctcagcctcctgagtagctgggattacaggcactcatcgacacacccggctaatttttgtattttcagtagagagggggtttcaccatcttgaccaggctggtcttgaactcctgaactcgtgatccacctgcctcagcacccccaaagtgctgggattacaggtgtgagccaccatgctcagctggtgaaaggtatgtatagagtcactaaactccttgcctctcaagagtgataaatcaggagtgtcaaatgcatttattttacataactctctaaacagttcatccctaggactatcagtgttctccacactattagaagtagagtccttagcatttttgggtctaatcatattaagcagccaacccccgaaacaccagaatcaaaaaaagaactccatccttaatattctgttcctctagaaccactcctgttaccaaaatctgtattagtcagggttctccagagggacagaactaatggtgtgcgtatatatacatatatgttaattaagtattaactcacacaatcactagatctcacaacaggccatctgtaggctgagaatcaaggagagccactccaagttccaaaactgaagaacttggagtctgatgttcaagggcaggaagcatccagcacaggagaaagatgtaggctgggagactaggccagtctttcttttcacatttttctgcctgcttatattctggccacgttggcagttgattagattgtgcccatccagattaagggtgagtctgccttttccagccaactgactcagttgttaatctcctttggcaacaccctcacagacacatccaggattaatactttgtatccttcaatccagtcacgttgacacacagtattaaccaccacacctagttaagagagtcaacatctctccatttggctgagtccaggtgaaacagtcatcaccatttttctaagctgaatccagaaatgagtcagcattctacctgtgggcagattcacatatcacagtcacaattccaactgtgaattttttttttttttttttttttgagatggagtctcgctgtgtcacccaggctgaagtgcagtggcacgatctgggctcactgcaactcctgcctcagcctcccgagtagctaggactacaggcacccgccaccatgcccggctaatttttttttgtattttaactagagacagggtttcaccgtgtgttagccaggatggtctcaatctcctgacctcatgatccgcccacctcggcctcccaaagtgctgggattacaggtgtaagccactgtgcctgccccaaactgtgaatttttttggtgtgtgagatttagaacctcaccagtgggctctgtttatatgtgaaggtgacaatactaagtgttagctttgtctgcgtattaaagtcacaatctcacttgcatactgggccctgggataaaactttggactgccagagggctttatgtaatttccataagtgtcataatcttctgtgactctcataggtaggagctcaggcaggagagtcacaacatttgggtgctgggctcagagttatgccacaatcccttttttgggcatgtctcctgcaacagagaagaggcacattatgtagaaaattggttcagggatttgtcacaatgtcccctttggatggtgcacaggcaggtgaggagagtcacatcacccagataatggaactagcaatatatcacaatgccctctgatggaaggacaaagacaagaaagtcacataacctaggtgagaaaacctgacataggtcacaattcatgttatgagtagggatcatggaaaagaggagagtcacataacctaggggatgcacccagatatatgtcataatcactgcagtgggcagggcctaggcatgagaatcacatcacataaatgctgggcctggccatatgtcacaatccccacggtatacaggtcccagaataaagtagagtcacatcatctacatgttgggaccaaagatatgtatcaatgacacctgtgggcaggggccaggcagaagagccacagcacctgtgtgctggaccctgtgataagttactatttatctgttggcatggcctggtcagaagaggcaaatcaaaccacctgggtgctgggcccagtgatatgtctcaatgtcttccataggcaaagcccaggtaacagaggagactcacatcaaatagttgatgggcccagagatatttcacaatgctccctgtgagcagggtccaggcaggagactcacatcacctttgtgctgggccactattttttgtgtgagcagaacataggaaaaagagaagcgttggctgggcacagtggctcacgcctgtaatcccagcactctgggaggctgaggagggtggatcacctgagatcaggagttcaagaccagcctgaccaacaaggtgaagccccatctctactaaaaatacaaaatacaccaagtgtggtggcaggcttctgtagtcccagctactcaggagactgagacagaagaattacttgagcccaggagcggagttttcagtgaaacaagatcatgctactgcactccagcctaggtgactgagtgagactccatctcaaaaaaagagagaaaagcatcacatcacctgagtgctgagcccagatatgtcccaatccctctgtgagcagaatccatgcagaagaagagagtcaacatacatggatgatgggcacagagatatttcataatgtcccctgtaggaaaggcacaggaagaagtgtaacatcacttgagtgttggacagtgcaatatgtcaaaatagccaatgtggtcagggcacaggcagaaatcacataacctgggtgcagggcctgacagtgcatcacaatgtcctctatgggcagagccaaggcaggagaataggtcacatcagctaagtgcttggccaagtgatacgtcataatccctactgggggctggaccgaggctgggaagtcaaagcgctcagattctgggcagaagcatacatcagaatcacaccagcaggatgatcctgaaatgaaattaacaatcccacacatgtcccagtttcaggtatgagagtcaacaccttttgtaggtttggtttaagtacctgcatcacaatttcaacaatgggctggatttgtacacaaaagacccaatccctcctgaagactgtgtccccttaatgaagccacagcctcacagctgtggggaatcttggtctgagagtaaccaacccacctatggatcagagccacatataagagttaattcttcaacttcccactgcctctgagtgggagattcagagcctcaactgtggtctgtgttcatgtggaaggatgaccatctttactattggctacctgtgcataagagtgtcacaatattacctgtgtgctgggccctgtgaggacggtctctctatcaatcaagggctttttatgttatgcatgagagtcagaatttgctctgagacctccatgctggtatgaacccatgattgtactcatggccctaaacccatgtatgagagtcaacatctctttaattgacctgctccggagaggagattcctcaattgcccatgagatggttttagaaatgagtcaccatctcatttgtggtcaggtgtttacatatgacagtcacaattccaactgtaagctgcatccatgtatgaagttcaagaactctccagtacactgtgtccttgtgtgaatgcaataatcctaataattggtggggtgtgcacacaagataaacagtctcgtctgtgtgctgggcctgtgatgacactctctgtatcacctgagggctttatacagtatgtgagggagtggaaataatctatgaccttcctacaaaaaggagactcaggatcttacccatttctctaagcttagctacaagagacagtatctctcctggtgactggtatgagagttattattgcacctgtcagccaggccaagatgtatgtaacaatcccatttgtcagtagagagtgagcaggatggtcacatcacatgagtgctgggaaagggtaaaatcacaatcatttttgaggccagggaccagggataaaagaaacatcaccttagtgctaggccaagggctatgttccactgttttctgtgggcaaggtgcaggcaaaacaaattcatcacctgttgctgggcccagcgatgtgtcacaattttccctgtgggcaaagtggaggctaaaaacaagggtcatatttcttgggtcatgatgcagagatacatcacaaggcctcctgtggacaggccacaggtagaaatcgccaatttcctaggtgttggagcccacgatatgtcaaaatacacaatgtatgcaaggcccaagcaggagaaaagattcacataacttagatgctgagcctagcaatacatcccaatttcttcttggacagatcccaagagatagaagagtcttatcacacaggttttgggtctagctatgtgtcaaaatattccctgaagggagagatcagaaaggagtgtaacctcacctaggtgagaagcccagagatgtttctgattctgtgtaaggctcaggaataaggtaagagtcaggtaacctagaaactaggctagattatatgttgcaattacccaagttgggggggggctctcatgagaagggagttacattatgtagctgctgagctaaacaatgcatcacagttcccactgtgtactggtcccagaaaggagagtcccatcatctaggtgatgggcccagaaatctggcatatgcatcctgcgggcaagtaacaggcagaagtatctcagcatgtctgtggtaagcccagtattaagttactctcccttctatgggcatgatccaggcagaagaagtcacatcacctaggtgctgggcccagagacatatcacaatctcttttgtgggaaaagacaaggtaaaagaagagactcacatcaaatagttgatgggtctagagatatgttacaatctttctgtgggcagggtctaggcaggagactcagtcactgtggtcctgggcatagcactgtgtaaaaatgctttattttggaagagccaaggcagaagaatatcacctgtctgttagcctagtgacatgtcacaacatcccctgaaaaccaaaccttgaaagaaaagtagaataatgtcagctaggtgctggtcccaattatttgtcaaaatccttcttttgagcagaaattggtagaagaggattatcaaaacacaaagttgactggtgcatagatatgttacagaaaaccttgtaggcaggaccaggccagagagttacatcacccaggtatcagactcagcaacatgtcaaaattgcccatatgggcagggcacaggcaggggttttcacctgtgtgctgggctctgttggaacactttctgcaccgcctgagggctttgtagagtgtgcataaaagtcacagtctgctctgagacctttctgagcatagttggcaaggtccagattacagagtccccactctctagttgacagggtctagatcagagagtcttcacctacctatgtactgcatttattaatgagtcaccaccttaattgtggccaaatgttaatatatgacagtcacaattccaactttgaactgtgtccacctgtgagattcaggagctcactagctggcttttgccatgtgtaagggtgacagtcctaacagttggcagtttctgcattttagaaacaatctcacctgtgcgctaagccctctgaagacattctttgtgccacccaaatggtttatgaaacacaccaaagattggtaattctttctttcttctcttttttttttttttttttgagagggagcctcatctcactctgtcacccaagctggagtgcaatggcatggtctcagctcactgcaacctctgcctcccgggttcaagtgattctcccacctcagcctcttgagtagctgggattacaggcacatgtcaccacacccggctaatttttgtatttttagtagagacagagtttcactatgttggccaggctgctctccaactcctgacctcgtgattcacccaccttggcctcccaaagtgctgggattacaggcatgagccacactgcccagtcagattgataactctttatgacattcatacaaagaggaggcccaggatcttacttgtttccctaggctacaatacaagagacactatctccctattggctgattccaggtacgggaatcatcatagcacctatgagttgggccaggatatttgtcacaatcccaactataagtagaaaatgagcagaagagtcacatcacctgggtgctgtatgaggaatgtcacatttccaggaagcagggcacaggcagaagggtcacataacctggtggccgagcccagtgatattttacaatgctccctgtgggaaaagacctgccagaaaagacacatcacctggttactgggcccagcgatatgtcacaatcttctctatgtgcaggatgcaggcagaaaaagagtcacatcactttggtgatagatgcagacatatgtcacaaggccgcctatgggcagggcttattaagtagcctctgatccagtcctgtaggtgttcggtccagctacatgtcacaataccaaaaatatgcatggctcagcaaaagaaaagatttacatcacctaagtgctggatccagtgatatgtcacaatcctcttctttggcatggccgaggaagaagtagagagtcacatcacctaggcgttggaccaagccatatgtcacaatacacaataaatgcagggctcatgaaaagagagtcagatctcttaggtgtggaacagtggtacatcacaatttctcgtttgtcagagccacatcacctaggtgcttggtccagtaatatgtcaaaattcccttgagaggtgagcccaggaaggaaagtcacatcatttcggtgagaagcccacagatgtgtcactattttccctgtgaatagggctcaggaagaaaaggatagtcacatcatttaaatgatgggcccagagatggattacaatggctcctgggtacaaaaacaaggcagaagaattacatcacctgtgtgctgggtccagtgatgagtcactttcccttgtgtgggcatggcttcagcaggagacaagagtcacatcactaaggttctggttccagagatatgtcataatctctcctattgacaaagcatgggtaggagaggagagtcaaatgaagcagttgatgggcccagagatatgtcacaatgcccccccccccacccccaataggcagagtacaagcaggtgcctcccaattctttaggtgttatggtcagggacatgtcacaatacttaaaaaatgcaagacccaggcaataaaacagagtcacatcacctaggtgctaggttcggtgatatatcacaatccctaattcaagagggctcagggaaataaaaagagtcacataaccaaagtgataaaggtaaagatatgtcataatactcctgtgggcagagtccattcaggagagtcacattaccttgatgttggacccagccatatatcacaatacacagcatatccagggctcaagcagggaagaaaaatcacatcgtctagttgctgggtttgatgatatgtcacaatcacttgtttttgcagaacccagacagaaaagaagagtcacatctcctagttcatggatgcagagataagccaaaaggttccttgtgggcaggacccaggcaggaggctctcgtgccctaggtgtttgtctcagccatacgtcacagtacctaatatatgcagggcccaggcaaacaaggagaatcataacaccttggtactaagtttagtgatatgttacaatccccacttttggcagggccaggatgcacacacatgcgaacaaaggcacatcacataggtgattaaaaaaagaaaaaaacatatgtcataatacccctgtaggcagggcccatgcagaagagtctcatcaactaggttttagacccagttatttgtcacaatacacaatttatgcaagactcagacacaagaggaaagtcatgtaacctaggtgctgggtccagtgatacattagaatctctccttgggtagagtccaagcagtagaaaagagttacattacctgggtacttgctccaggaatatgtcacaatacctcctgaggaaagagtccaggaaggggagtcacatcacctaattgaggggcccaaagatatatttcccagtgctccttgcaggtagagctggggataatcaaaagagtcacataacccaggggctgagcccagctatatgtcacaactaccctaggtgcaagtctctggtatgagagaagagtcacattacataggtactgggccaagtaatatgtcacaatctccactgtaggaaggtctcaggaaaagagaagagtcacattatctgggtgatgggcacaggaacgtatcacaattaccctagacagaagcgttacatcacctgtgtgtgaggtccagtgataagccactcttccttttgtgcacagggtccaaacaaaagatgaaagtcacatcacctaggtgctgggcttccagaattgtctcaatccctcctatggtcaaagccaatttaagagacaagaattatattagctgctctgcctatggagcagctttttttgtttgtttgtttctttacttctctaataaacttgctttcattttactgcatgggatcaccctgacttcttggggtctggattaaaagcccttttcagtaacagctttctggcaaattataaagggactatactgaggagaaaactgaaccaaaggaaataaactgcagcaccaattagccaactttgggtaactagtggggtatattctaccagggtaaaaaatgggattgggttagaggcccaatatagaagcagtacagtctctcctaagacatattgggttaaagacctctcttaataaaaagcttgaggacccagttatgaaggttcaagtcctttctaagatttaaggggttggccaggcacggcggctcatgtcagtaatcccagcactctgggaggctgaggcaggtggattacctgacgtcagaagttcgagaccagcctgaccaacatggagaaaacccatctctactaaaaatacaaaaactagctgggcgtgttgacatatgcctgcaatcctagctactcaggaggctgaggtgggagaatcacttgaacacgggaggcagaggtagcggtaagccaagatcgtaccattgcactccagcctgggcaacaagagggaaactctggctcaaaaaaaaaaaaatttagggggttagaggcccctctcagtaatgtcactcttggttaaaaaatcgacgaggcaggccaggcacggtggctcatgcctgtaatcccagctactcaggaggctgaggcaggagaatgtcttgaacctgggaggcagaggttgcagtgagccaagatcgtgccactgcactttttagattaattttccctgtgctctttgctgacagttgtgcgtgacacgattaggcatgtacaggatcataagacatggggagcttctattctcctcaaaaggggaaactttaggtatatctcctaatgctatccctcccccctccccctaccccacaacaggccccaatgtgtgatgttccccttcctgtgtccaagtgttctcattgctcaattcccacctatgagtgagaacatgcggtgcttggttttttgtccttgtgatagtttgctgagaatggtggtttccagcttcatccatgtccctacaaaggaaacgaactcatcatttttttatggctgcatagtattccatggtgtatatgtgccacattttcttaatccagtctatcattgttggacatttgggttggttccaagtctttactattgtgagtagtgctgcaataaacatatgtgtgcatgtgtctttatagcagcatgatttatattcctttgggtatatacccagtaatgggatggctgggtcaaatggtatttctagttctagatccccgaagaatcaccacagtcttctataatggttgaactagtttacagtcccaccaacagtgtaaaagtgttcctatttctccacattctctccagcacctgttgtttcctgactttttaatgatcacatgtaacaaacctgcacgttgtgcacatgtaccctagaacttaaagtattttatatatattaaaagaaagggggaaacttgagagctaatgaaattgctggaaaagatcccttcatgactgagaagtcaccgcctgaatttctcagtgccgctgcaatgggtgggtctttcactggcgtccctgagctcctccctttccccaacctgcctcaggcaatgcttttctttccttctctcctctttctttcttatcttttctgttatttagtgcaactgtcctttgtggttttttgtttgtttgtttgtttgttttgagatggagtttcactgttgttgtcagggctggagtgccatggcgcattcttggctcaccacaaactctgcctcctgagttcaagtgattctcctgcctcagcctcctgagtagctgggattacaggaacttgccaccatgcctggctaatttttgtatttttagtagagacagggtttcaccatgttggtcaggctggtctcgaactcctgacctcaagtgatctgcccaccttggcctcccaaagtgctgggattacaggcgtgagccaccacacccggccatgtgtgatagttatatatgaaagagttctgattaattggcttaaaaataataaatgcttaagtctaattttttttcagaaaaggaacaaacgtaatgccttttatctcatgtgacataagtaatctttgggaactaaaagcagttttacatgcaaggtgtgtaagaaaagtagaatgtgcttttggtaaatgatcataagatggcataaaaatgttaatttttttggcctagtttagagggctaaagagttgttttaagttaggattgagctgaaggtttgagcaagttttggaaggtttgtaaaaattaagcttgtaaaaaaaattctgtgtgtgaacatattggctaaagttaaagagatattattcagttttttttgttttttcttttttgtttttgagacagagtttcgttcctgttgcccaagctggagtgcagtggcgcaatctcagctcaccgcaacctctgcctcccaggttcaagtaattctcctgcctcagcctccctagtagctgggattacaggcatgtgccaccatgcccagctaattttgtatttttagtagagacggggtttctccatgttagtcaggctggtctcaaactcctgacctcaggtgatccatcagccttggcctcccaaagtgttgggattacaggcgtgagccaccatgcctggcctgtattcagtttttttaaataaattaaacattggaatataagtacaacgggtttttttttttttaaagcacagatctgttccttaacaaaaattgcagagttattaaacgtttatgaaaatcttgccttatggtcaaactgattaagattggatagacttgtatataagattttattaaaaacttgttttggccaggtgcagtggctcacacctgtaatcccagcacttcaggagccaaggagggaggatcacttgaggtcaggagtttgggaccagcctgactaacatggtgaaacccgtctctactaaaaatacaaaaattatccaagtgtggtggcacatgcttgtaaccccaaatactagggaggctgaggcaggagaattgcttgagcccaggaggcggaggtttcagtgagccaagatcatgccactgcactccaccctgggtgacaagagtgaaactccatctcaaaaaaaaaaaaagaaaaaactgggtttgaaatcaatagtacactaattcatacgtgaaatgtaggcttctcttttaaacaagatttttatattatattttgaaaaatgaaaaatttttgtctgccttttgaataaactacaagaaaaaaaagacaggagacaaatagtttggaaagctaagtctttatcaaaaaggaaaggtttttgcctttttaataatctttaagaaggcaagttatttttattattatttttgagataaagtctcactctgttgcccaggctggattgcagtggcgtgattacctcactccaacctccacctcccgggttcaggtgattctcatgcctcagcctcctgagtacccgagattataggaacacattaccctgcccacctgttttttgtttgtttgtttgtttgttttttggtcattgtttgtttgtttttgagatggagatggcttccaactatgtctacacagtccctgtgcagggttcctgacccatggtaagtaaggaatgtcatttcttttttttttttttaagacagagtttccttctatcacccagcctggggtacaatggtgtgatttcaactaactgcaacctctgcttcccaggttcaagtgatcctcctgcctcagctgcctgagtaactgagactacaggtgcatgccacgacacccagctaatattagtatttcatgtcaagatgggttttcaccatgttgagcaggctggtctcaaacttctgacctcaggtgatccactcaccttggtctcccatagtgctgggattacaagtgtgagccactatgcctggccaggaatgtctctttctgacagaatcaggagcctgaagttgtcttgggaccccaagaagagagaaattcacccaactcacaggtatctgatggtacaaacccatggctgggcttggcttttaaaaagtcttttctgatattcctttaatggaacatagttatatcaaagccaattttaaaaacctatgtgaaaaataattatttttgctgcactttatacaaataatcaggccaactataagactaaagctttttatgcaagtaaatcagttttaccatgatttgtctttagtagaaatggaagactggagagagaaaaaaatcatgtttcaagaactatggtacacctgttgttacacactagtctcatttgttgtttttgagtattttccctgctatttagactaattctgcttattcctttgaacacaccagtgatctctgactgcagctcaaaagaaacaagagagatgggtaatataaaaatccagatcaggcaccaggcacggtggctcatgcctgtaatcccagcactttgggaggccgaggtgggcagatcacgatgtcaggggttcgagaccagcctggcccacatggtgaaaccctgtctctgctaaaaatacaaaaattagccgggcgtggtggcacgtgcctgtaatcccagctactgaggaagctaaggcaggagaatcacttgaacctgggagccagagttgcagtgagccaagattgcaccactgcactccagcctggccgacagagcaagactccatctcaaaaaaaaaaaaaaaaaatccggatcactaatctaattctgaacacatattggaatcaggtagcaaacccatatcagcttcttcccaacatttgcccttatttagtttacttgggataattttacttattttactttacttgggataattttacttattttactttactgttgtggattatattgttgttgtgctctttgtgtagaaatgcaagataagcttgctcaatgttttcttaagtagaacacttaattttgcagatatcaacatttgttaagaactcaagacttataaatgatccttgtaatattgatgctttctcacctggctgggcatggtggttcacgcctgtaatcttaacactttgggaggccaaagcaggtggattgcctgagatcaagagttcaagaccagcttggccaacatggtaaaaccctgtctctactaaaaatagaaaaatcagctgggcatggtggtgggtacctgtaatcccagcttctcatgaggctgaggcaagagaatcgcttgaacccaggaggcggaagctgcagtgagctgagatcgtgccactgcattccagcctgggcaacagagtgagactctgtctgaaaaaaaaaaagaaaagaaagtaggaaagaaagaaagaaaagaaaaaaaaaaaagaagagtcaaatcacctaggcgctgggcccagagatactctataacccctcactgggcacagccaaagcaggagaaaaatttacataacctagatgctgggtacagcagtatgtcccaataccccttgaaagaagggtgagccagagagtaatatcacccatgtgagggaccaaaaggtatgttacaatgccttctgtaggcagaggacagggtggaggattacatcaccttcatgttggactcagcaatatgtcacaatggcccatgtgggcaaaacacaggcacgagagtcacataacctaagtgcgaggagccacaatatgtcaaagttgtctctatgggcagaaccaagacattgactaagcgctggtgcagaaagatgtcactacccagtctgtgggctgagcccaggcaggagcataaaattgctcaagtgctaggctgaggtatatgtcacagtcacagctacatgaaggtccagagatgagattaaccatcctgatcatgtcttggttctaggtatgagaggcaccacctcctgtatgttgggtataggtgtataacccacaatctcaacagtttgctgaatccatccataagagcctcaatccctcctacagactgtgtccctttagtggagtcaaagcctcacagatatgctggatcttggtcttagtgtcaccaacccacctgtgaaccgaatccatgtatgaaccagttttccatcttcaactttctttggatgtgagattcagaacctcaacagtcagctgtgttcatgtggaagaatgacaatatttactgccagctgggtacatatatgagtgtcataatcgcacctctataccatgctctgttaggacaccctttgtatcacctgagggatatgtatatatgataatgggtgtgtgtgtgtgtgtgtgtatatatatatatatatatatatgataatgtgtatatatatatatgataatgtatatatatatgataatgtgtatatatatatgataatgtgtgtatatatatgataatttgcatatatatatgataatgtgtatatatatgtatatatacacattaaagtcacagtatgctctgagactttgtgcatctacagactcatgatcctacctgtggccccaaacccaggactaagagtcaacatctctccattgaatgcatccaggtagaaaggatctaacttgccagaattagaaatgagtcaccatgtcaactgtagctggatgttcacatatgacggtcacaatccaaactgtgggctgtgtcaatgtgtgaaattcaggacctctccaatggggtctgtccatctgtgagggcgacagtcttaacagttggtggtatgtgcatataagaaacacagtctcacctgtttagtgtgccctgtaatgacactttctgtaccactcaagggctttatataatatgtaaaaaatagtagtcttttatgaccttaatacatagagaagacccataatctctctcattttcctaagtctggttatgggagacagtatctcttctattggctggtttgaggtataagagcatttaataaacctgtgagctggacaaaatatatgtcacaattctacctgtgggtaggaagtgagcagcagattcacatcacataggtttttggcaaagatatgtcacaatctttcctgaggtcagaaaccaggcagaagtcatatcacctaggtgttcagccacagatatattacaatcccctcttaaagcagagtacaggcagcagagtcatttcacctgggtgctgagcccagtgatatgtcaaaatgctctctgtgggcacagccttggcaggagagacacatcatctggtgactgggtccagcaatacattacaacattttctgtgggcaggatgcaggcaaaagaagagagtcacatctcttaggtgatggaggaagagacatcttacaaggcccctcatgggcagggcacaggcaggagcctcccaccctgaaggaatgatgcccagctatatgtaacaatacccaagatatgctgggcccagggaaaacagaagagtagcatcacttaagtgctgggtttagtgatgtgtcaaaatcccccattttgtcagggcccaagcagaagagaagagtcacatcacctaggtgatgaatgaacagatatgttataatacctctgtaggcagggcccaaacagatttgcatcacaaaagtgtttggtccaggcaggagaggaaagtcacgtcacctaggtgttaagcccagtgacatatcacaatctgttcttgggcagagaccaagaagtagaggaaagtcacttcccctgggttctagggccagcaaaatgtcacaatgccctctgtggaaagtgctaaggcaaaagtgtagtctcacaccacctagatgctgggttcagtgatatgccacaatttcacctgtaggacctaggcagaagggtcaaatcactcagttgctgggaagagctgtatgatacaatcacacatgcaagatggtgtaagaatgagattaacgatcccatacatgatctggttcaaggtacgagagtcaatacctactgtatgttgtgtctaattacacgagtcaccatctcaaaggtgaactggatctgtgtattaaatcctcaatccctcccatgaactgtgttccctcagtggagtcagaggctcacaggtgtgctgaatcttggtctgagagtcaccaacccatctgtggacaagatccatgtatgtgattcaatttttcaactttcaactgcctttgggtgtgaggttcagaacctcaaaattggctgggttcatgtgggaaaatgacaatctttactattgtcagggtgcgcacaggagtgtcataatctcacctgtgtgcttggccctttaggacactctctgtactaccctagggctttacatggtttgcatgagagccacaatccagcttgagattttcatgctggtataaacctatgattgtatctgtgtctctaagcccagttatgagagtcaacatctctccaattttctgggttcagataggagagccctcactttcctatgagctgcatttaaaaatgttttgctatcactgggtgcagtggctcacacttgtaatgccagcactttgggaggctgaggtgggtgaatcacaaagtcaggagatcgagaccatcctggctaacacggtgaaaccctgtctctactaaaaatacaaaaaattagccaggcgtggtggcgggtgcctgttgtctcagctactcaagaggctgaggcaggagaagggcatatacctgggaggcagagcttgcagtgagccgagatagtgccactgcactcctgcactcctgcactccagcctgggtgacagagcaagactccatctcaaaaaaaaaaaaaaaaatagttttgctatcccaaatctggatggacggtcacatatgacagtcacaattccaactgtggactgcatccatgtgtgggattcacaattgcagtctgtccacctgtgagggtcacaattttaacaggtgcttggttgtccatacatgcaagtcaatctcatctgtgtgctgggctctgtgatgacacactgtgtacaatccaaaggctttataccataggtgagagtgtggtaatcccctctgaccttcataaaaataggagaccctgaatcttaccaattttcctaagcctagctatgagaagcagcatatcaactgtcgtctggtttaagatatgagagtcatcatctcacctgtgagatgggacatgtaacctgtgagtaggtagtgagtaggagagtcacatcacctgagtgcttggccagagatttgtacaatattccccgctagaagggaccaggcaggagaggactatcacctgggtgcttggccagagatttgtacaatattccctgatagaaggtaccaggcaggagaggaacatcacctgggtgctgagcccagtgatatgtcacaatgctccctttgggcaaggttcaggcaaaagaaacacatcatctggtcagtaggcccagcaatatgttacagtcttctctataggcagggtgcaggtagaagaggacagtcatatctcactggtaatggatgcagagatatgtcacaaggccttctgtgagcaggacgcatgcatgtgcctcctatcccctatgtgttgagtccagtgatatgatacaatacccaaatatgcagggcccaggcaaaataggagtgtcacctcacctaggttctgggtccagtgattcattacaatccccttttattggcagggcccaggcagaagagaagaggcacatcacctaggggatgaatgaaaaaatatatcttaatacccctgtaaatagaacccacgcataagagtcacatcaactaggtggtggacccagccatatgtcacaatacacaatgtaggcagggcccaaacataaaaggagagtcacatcttctaggtgctaggactagtgatacatcacaatccctccttgggcagagtctaagcaggcaaggggagtcacatcacctaaatgctgagtccagcaatgtgtcacaataactcctgagggaagagtccaagcagtattgttatatcacctgggtgctgggacaggaatatgttgcaatcttccttgaaagcaaagactaggcaggagaatcacatcacctagtttctgggaccagcaatattgtcacagtgcttcccagtggactaggcccaggctggagaaacacatgacctggttgccagacccagtcacaatcttccctgagggtagagaacaggcaggaaaaaggcacaacccctacaagatagatgctgagaaatacaataagccccctctagtcagggtcaaggtaaaagtctcttatctcctaggtgttggacccagcaatatgtccaataccaaaaatacgcaaggcccaggtaaaagaggtgagtcacatcactaagatgctgggtccagtgataagtcactattattctttctggcagggaccaggcagaaaatgtgattcacatcacctaggtgactaacgacatgataggtaataatgtccctgggggcagagcccatacaggagaatcaaatgactcagacattgcacccagacacatgtcacaatagcaatgtatgtacagcccaggcaggagaggagagtcacataacctaggtgctgggcccagtgataaatcacagtttcttattgggcagagcacaagtggtagagaagagtcatatcacctagttgcttggtctgacaatatgtaacaataccccctgaggagcaggctcaggcaggagagtcacatcacctaggtgatgagctcagagatatgtcacaatgccctcaggtgcgtagggcttaggaagaaaagaaaaattacataaactaggtccagggctcacccatatgtaatgatcaccccagtgggggagcacccaggcatgacaagagagtcacatcatgtaggagctggctcaagcaatatgtagcaatctccattgtggacaggactgaaaaaaagactggccacatcagccatcaaccatgtgatgaaatcagaaatatgtcaaaattattcctgtgagcaaagaccaggcagaagaattacatcatgtgtgctgggcttagtaataagtcactctcttctctgtgggcatggtccaggcaaaagaaaaaagtcacattacctaggtgctgggcccagagttatgtcacaacctcttctatggagaaagcccaggtaaaagagaagagtcacatcaaatagttgatgggctcagagatatgtcacagtgccccttgttaacagggtccaggcagaagacttacatcttcttcgtgctgggttcagcagtatttcacaatgttgtttgagagcaggaccaaggaaagagagtaacataaccttggtgttgggcccagtgatatgtcacaatgtcccctgtgggcaaaacctagaaaaaagagaggaatcacattatctaggtgctggacctggcagtctgtttcaataccctctgtaagcaggaactaggcaggaaaggagagtcacatcacctatgtaatggtcacagcgatacgtcagaatgctctctgtaggcaaggcctaggcaggagatttacatcacctgggtgttacactcaggaatatgtcacaatggcccatgtaaggcacaggcaggagagtcacataacctggatgttgggtgcagtgatatgtcacagtgttccctatgggcaatgccaagtcaggagaatagattcccatcacctaggtcctgagttcagcgatgtgtcacaatcctatctgtgacctgagcccaggcaggagagtcaaatcactcaagtgctggacaaaggcatatgtcacaatcacagctgcagggtggtccataaatgagattatcaattctgcacatgttcaggagttacaatctcaactggggactttatctctgcatgagagcttctatttgtcctgcacgctgggtgtccttagtggagtcaaagtctcttaggtttcaggtatcctgaatcttggtctgagagtcaccaactcatcctattgctgggtcaatgttgcagcagacctgtacccatacggattcactgccagtaacaggtaacaggtaggagagaacagtaacatctcctaggtgcttgatccaaacatgtcacaatagcctctttggggagggctcagatgaaagagtcccattatctaggtgaagtgtttagagatatgtcacaatgctccctgtgggcaggactcaggaagaagagaagagtcacataacctagaagctgtgcccagctgtatgtcacaaccagcccagtgggaagagccaaggcatcagatgagagtcacatcacataggtgctgggtcaagtgatatgtcacaatctccttttgtggacaggacccaggaagaaaaaaagtctcacatcatctaggaggagagcccaaaaatatgtaacgatgattctcgtgggcaagaatcaaggcagtagagtgaagtcacctgtgtgctggacccatgggtaaatgattcttccttttgtagacatggcccaggcacaattacatcaactaggtgctgtgcccacagaaatattacattctctcctatgggcaaagagctggcataacaagataatcgcttcaaatagttttgagctttcagagatatgtcacgatgatctctgtggtcagggaccacgcagaagactcacatcatgttggtggtgggcccaacaatatgtcacaatgttttctgagaagaaggtcaaggtaaaagagtaatgtcactttggtattgggcccagcaatatgtcactatctcccatgtgagcagagaccaggtaagagaagagaatcatatcaccttagttatgagcacagacatatgtcacaaagccccaagtaggtagtgccaaggcaggagaatactgtcacattacctaggtgctggatcctgtgatatgccgcaatccaatttgtcagctaagacctcacaaaaaagtcaagtcactcaggtgctgggagatgcaggaagattcgggggtaagattaataattccacacatggcagggtgtccacagttctggccccagaccccaggtcccggccagattccccaaagtcagaggctggaatctggtggtggatgtagggtgtcagctgagcccaacccctgcccagcggtggccagcatctaataattagtaactccacacagcggctcacacctgtaatcccagcaatttgggaggctgaggtagacggatcacctgaggtcaggagtttgagaccagcctggccaacatggcaaaaccctgtctctactaaaaacacaaaaattagccgggcattgtggcacatgcctgtaatcccagctgctcaggaggctgagaaagaagaaacgcttgaacctaggaggtggaggttgcagtgagccgagatcatgccactgcactccaacgtgggtgacagagcaacagtccatctcaaaaaaagaaagaaaataatgataataataattccacacatgtcccagttctaggtatgagggtcaacacctcctgaatgttgagtctaagtacatgagtcacaatctcaacagtagactgcatcaaagcctctattcttcctgcaaactttgtcttcttagtaaagtcacagccttacaggtttgctgagtcatggtgtgagagtcaacaaccagcctgtaaaccagatccatgtgtgcaagtcaattttccatcttttgaccacctttgggtgtaggattcggaacctcaacagtgggctctgtgaagtcaccagctgaagggctattcatgcacgaaaagttgttattttatcatcattgtttctattgcttttaccttgctaagaatacatgtgtagcttataattgtgctagaaaaccataagggttttggttaaattacccgttgttgtatgttatgaaatagacaaaaaattggcaaaaatagattaaaattatacaaacttggtgtcaactttctcttgggcaagtttaggaaagacagacctggaaataccccagtaaaaggctaatcagaatctcagaaaaattgcaaccattagtcctttatctacctatgacctggcagctcccgccctgcttcgagttctcccactttcctggacaatgtacaccttccatatatcgattaatgtctcctgactcctaaaatgtataaaatcaagctgtgacccaaccaccttaggcccgcgttgtcacgacctcgtgaggcggtgtcacgggtgtgtctttaatcttggcaaaataaactttctaaattgagacctgtctcagatactttggggttcactttactaattttaggtagaatttaaaattcttaaaatagaaacaaacataaggactaaactgagaaaaactttaaaaagtatactcaaattcactgacacaatcatgggtatatctaaataatgagattccgttttaagtaagaagaaaatacgtaattacgaaggaggctttacctttgggaaaacaaaaagccacttttgaccaattattcccacagatacacacccgggtccccaaccacccgccaggagggcccatcctggtgcctggaaggcgggggttcctgcgatctggggttgggatttcggctcaggccgtgcgcggtggccttgggtcgcgcccgccctgcctgggcccccagcccaagggaccgagcgggtgcgggcggggcgggcggggcgggcggggcgggggtgtcgggggctcggactcggagccgtccctgccagtggctttcgtgggcggccccgccttggagcccaggccaacgagccgcgcgggacggaagagctgcgggtggggagggacaagcgggcggagaaggggcggccctgctggaggcccagcgagtctgagtgattgacaagtgaatgagctgggaatgaagactcctggggccgggagggagagagggggttggagggtggtgaatgcctgggcctctggggctccaggctgccagtggcccgaccaggctctcggtgtcctcctccaacctcagtttcctcacctgtcccagaggacgaatatgactgttgtgatgattaggccagataatcctggtaagcatttattagcctgcctggtctctggatattttttttttcttggtaaagacattttgccgcccaatatctactattggagagagagtttgggaggcagaaggtaggactcacccttggcttcagagtcccttatgggtgccccatccccttaggttcaattaaagcacatagttggaaacaagtcccctacccaggacagctacagagtccagaaccagaagatcttgttttctgaaccaaggactttgtcttatccccaaatcctaattcctcagggtggtcagcttcagacaggagtctgaaattgattctcgctctccggggtggatccaaggctcttgtgatgcggtgttgttctaccccatcccacccctgtgcctcccccaatgcattgggagtccttaaccgtagtgacttcaatttggaaacaatgctcccaaagcaggagatgtggccctccccaggcagctggcctgataaacatctgtcctggggcaaaagacccagagcagggagggactctcacttcccactttcacatgctatagtcatttaatgggctgtggtgacatctctgggtcacctagcctgcagaatgggatgttgactttgtgccacaatgagggaaacggaggcacagggctagtgagtgaaaaaaatcagaaagactctgtgactaggaaacactattcaggcccacggcccctacaggactcagcatcctttggggtgcaccagtgggtggtatgcggcaccctggttgccatctgtaccttatgggggtgagggtgacggtgagtgtcctggcaggacaaggtgctctaggacccacgaggtagatagacattgcccgcctttccctggctgtgggcacagcaagagttctgttctctaatgtatgtgaggaccagtgcctacatgcaatagacacttctcatttcagacattccaaagattttaggggctgcatagaaagaaactgagacagactctaaccacatcctcacactgacaggagcctccagtctaggctcagctctgactcttcctggggaggtttgctccaccctcgtccttccaactagaacccactcccggtaggcctgtgcacgcccatcttttacagcagcagcatgtcttggtaacttgacattttctgcaataatcttgctgtttgttgtttacttctttagtgtttgttcctggcagctgtgtctagttcaccactgtgttcccagtgccaagcacagtgctcggcccgtgggaggtgctcaatgagcagttgtttaatcaatgaacaatggctctgtctatgccagggaagcaggagtaggtcagagcacaccttagctcacccatttcctgtctgggtgaccttggataagtcctgaacttttttcctttcagtcaccttgtctgtgacatggagattaattaaacttacctgagttatttctgatgagaatttaatgcgcaaaagtatctaaaatgcttctaaacacaggctggcacagtgagagtgcggcacacatgtgagctgtttgcattatcatgccgcaggttgttggaattctttttcactcatcatttggatcttgaaactctgtttacctcattgcatataaggaaaatacattttgaattatgtttagtatttcacactgaaattatttaaaatgtctatagctaggtaagatgtggttgctcatgccaccatcaaaccacagcactccagcctaagtgatagagtgagatcctgtctcaaaaaatacatgtaaatagttggctgggcgtggtggctcacacctgtaatcccagcactttgggaggccgaggtgggcaggatcacaaggtcaggagatcgagaccatcctggctaacacagtgaaaccccgtctctactaaaaataaaaataaaaaatagctgggcatggtggcggacacctgtagtcccagctactccggaggctgaggtaggagaatggtgtgaacccgggaggcggagcttgcagtgagttgaaatagcaccactgcactccggcctgggcaactgagcgagactccatctcaaaaaaaaaaatacatataattaattgatatttatatatgattcctgtgtgctgcataactcttgtagcacagagttgtttattttttagataatgtacattacacagagttgtttattttttagataatgtacattatttgcctttttcagtgatatttttgtattttatattcagttgaaatagcatttctattagttgtacaaataaatatattatttcctattttcagctaataaccatagctgcatagttttaaaatattttattaacttatctggaagagttgataagataaacttattttatattttgtgtatgaacatataaatatattttatgtttttgtgtgtgaatatataaaaatattttatattttgtatttgaacatataaatatctggacactgtaataaactgataatacatttcaaatgcttttgttaatcactctatttttaatcactctattttagattcatcctttttatacattctatgaatggatggatggagaatacgtagacagatagtatataaatgtatgtgtagataaatgtagatgcaaatacacatctgttgagacaatgctgctttcaaaatcacagagaatggtcacattttaaccttttatggaattaaataaaacaaaagattttctatttttaattacatttacattttaataatacaatacataaataacatatttttaataaaattctggattccatttaatattatattattagaacttctgtatctattctgacacttgagattaactttaactttccttttgctgagtttgcccagtttttatttgaagtaatactacatcatgggatcaccttagaggctttctatatttatatgttttgcatcagtttctaaaatctggaaattatctcattttgaatttcttatggaaatagaatcttccccactaaaaatatcccattagtatactgcactttattattattatattttttttttccaagacagagtctagctctgttacccaggctggagtgcaatggtgcgatctcggctcactgcaacctccgcctcctgggttcaagcaattctcctgcctcagcctccgaaatagctgggtttacaagcgcctgccaccacgcccagctaatttttgtatttttagtagagatggggcttcactgtgttggccaggctggtctcgagctcctgcccttgtaatctgccctcctcggcctcccaaagtgctgggattacaggcgtgagccactgtgcctggctactgcactaaatgtttctctttctggttatattatctatataatatttagttatttttatttattttaatttgctttcaattttcgtatttgcttttgaaattacttttttaactggcataatattcccttggattctattaatgaacgtccgtgctgttttatattttgatattaaaaataaaacctcagtgtggatgtgatggctcatgcctgtaattccagcattttgggaggctgaggtgggaggattacttaagtccaggagtttgagaccagactgggctacataatgtggctgcctgttgtctaagtcatctgaactcccttggggaggggcagcagccatcactgcagctgctagctaccaatgacactaagcccctggggtgcaggggagggtggcagtcatcactgtagctccaggccatgctattcccctgttggagccaaggaggttagaccgcttggtcccaagaggcattccccacagcacagcacaccagctgttgcagacaatggcctgactctctctttaggccagaccttcatccatcccttctcactgagtggggcctccctgcagaaactccaacaactccagctgggagctcagggacaaaaccttgatcttcctgggcctgaccccctagggggagaggttgccatagtctccatggaccagcagacttagtctttcctcttgctagctctgcaaaattcaggcagcccagatgagtcagtttccctccaccacagcacaccccctccaccaagggacagccaaaatgcttccttaaatggttcctggttcccatgccctcaactgtgtgagacccccaataggggtctccagacactttatacagaagcattcctcctgacattaggtcactgtcccttggagtcagaaatcccagaggaaggaggaggcacccatctttgctgttctccagctttctctgtgggcatctccaggtgcaggagtgacccagataaataggcctgaagtgaacccccagcaaaccactgtagccttacagaagaggaacatgcctattgaaagaaaaacaaataaaaggctacagcaacaatgtcaacaaaaaaagttcctacaatggccgggcatggtggctcacaactgtaatcccagcactttgggaggctgaggcaggtggatcatgaggtcaggagtttcagaccagcctggccaagatagtgaaaccccgtctctactaaaaatacaaaaattagccaggtgccatgctgggcacctgtaatcccagctactcgggaggctgaggcagtagaattgcttgaagccaggaggtggaggttgcagtgagctgagatcatgccactgcacaccagcgggggtgacagagcaagactccatcttgaaaaaaaaaaaagtccccacaaaaacttcagctaagagtcagcagcctcaaagatcaaaactggacaaactcatgaagataagaaagaatcaacacaacattgctgaacacacaaaagaccagagtgcttcctctctaaatgatcacaacacctctccagcaagggcacagatctgaacagagaaaagactgatgaattgacagaagtaggcttcagaaagtgggtaataacaaacttcaaggaggtaaagatgcatgtcctcactcaatgcaaagaagataagaaccatgataaaagattacatgagttgctaactggaataaccagtttagagagaaacataaatgatctgatggagctgaaaacacagcacaagaactttgtaaagtatacacaggtatcagtagccaaagctatcaagcagaagaaagaatatcagagcttgaagactatcttgctgaaataaggcaggcagacaagatgagagaaaaaagaataaaaaggaatgaacaaaacctttgagaactatgggactatgtaaaaagaccaaacctatgactgattggagttcccaaaagagatggggagaatgaaaccaagctggaaaacacacttcaggagatcatccaggagaaattccccaacctagaaagacagaccaacattcaaatttagaaaatacagagaacctcagtatgatacttcatgagaagatcaaccccaagacatataatcatcagattctccagggtcgaaatgaaggaagaaatgctaaggccagccagagagaaaagtcaggtcatctacaaagggaagtctatcagactaaaagcagatctctcagcagaaactctacaagcagaagagagtggggggccaatatttaacattctggaataaactaattttcaacccagaatttatatccaggcaaactaagcttcataagcaaaggagtaataaaatccttttcagacaagtaaatgctgaaagaattcatcaccacaaggcctgccttgctagaactcctgaaagaagcattaaatatggaaaaaaacaaacaaacaaacaaacacccataacagccactgcaaagacacactgaaatacaaagatcaatgacactgtgaacaatctgcatcaactagtgtgcaaaataaccagctagcatcatgatgatgggatcaacttcacacataacaatattagcgttaaacataaatgggttaaatggaccaattaaaagatatagactggccaattggatgaagattaaagatttattggtgtgctgtattcaagagactcgtttcacatgcaaagacacacatatgcccaaaataaaaaaaaaaaaaaaaaaaggaaaatttactaagcaaatgggaagcagaaaaaagcaggggtggcaattctagtttcctacaaaacaggctttaaaccaacaaagatcaaaaaaagcaaagaagggcattacataaggtagcaagacaaactgcagacaaaacccctcagacaccgagttaaagaaggaagggctttattcggccgggagcttcagcaagactcatgtctccaaaaaccgagctcccccagtgagcaattcctgtctcttttaagggcttacaactctaagggggtccatatgagagggtcatgatcaattgagcaagcagggggtacgtgactggggactgcatgcactggtaatcagaatggaacagaacaggacagggattttcacaatgcttttccatacaatgtctggaatctatacataacataaccaattaggttaggggtcaatctttaaccaggcccagggtgagacaccaggctgtctgcctgtggatttcatttctgcctttagtttttacttcttctttctttggaggcagaaattgggcaaaagacaatatgtggggttgctgccagagcccttagacatggaggccagcctttggaaaccccatctagttgttttgagagataggccactggccttggccagggccccacagcctgggttgaaactccaactgccattatttctctttctgacacatagagtgtaaagggttttgtcaagtcaggtatccccagggctggggccaacatcagtttttcttttaactcatgaaaagctcattgctgttggttataatagaagtagtttatccaatctacatttttattaagtgtcgtccaccaaaatattgtctcaaatcctgcagctatttgatttcaagctttaaattgatctggtattccccatgggactccaattacatctaaatagatgtgagagtcgaaagacccataaggggcttctctcactttatggtgtcttatttttcctccctcttgttgatgaaatgccagggtgaaagggatagccaattggactaaagtacaaattccactccagttatttggcagagtgcccagtaaaggtccatcacaataccaccacacatccatgccaggatgaacaaagggctgactgattgataagctcttgaaaattcttaagctcagtacatcccttcaggtttccaaggaatgctaagtttcctccctatcatgagagatgcaaagtgaacttagtgttgggagatggaagctggatggcccttgggggcagatccacagggtgccagacttagggatatagcagagagagcttggcatgacttattactccaggctatagaatgctggaaaacagctaccatacagcccatgcctgggcaactggaggaccaccttagtggaaaggggacaatcagggcctctggcctgccatgtgctcaagcataacaattgtctttgtttaatgtgtggatggaatatttgatccattccaaccaggcatttgcatcttggtatcctgtcttaattgccaaagtttgttttaagtctttaacttctatgatcctctagtaaaatgaatgtatgattttaggaaattacaaaaactggttggggcagtccatccttgctctttagtggtccacagaaagttggaccagctatggcataaaagctctacattgggggccaagaatcctggttgacattggagtctttatcaaaatttccccagattaaatggtcctaatttactaatgcccagtctgaggagagtcaggagggacagaggtacttttctgaagtagagagctgtctttgacttggcaattccccacagggtataacaacgcaagcattaaaggcaatggcttgaggcgaaattgacttggttatgttaataaccctagaaggtcagcaatagagcaaggaaaaaagaaagagtaatagaatagatgaaagagttaaatttttctcagctttagtttggtagagttttccgctgggactatggcccatgactctggagggggtggtgctttcttgactcgggtgtgatgagtccatcattttttcactgtacaaacagcagtcttggtggttaacagcacaaagtagggtccttcctaggctggctcgagtttcctttcttttcaccctttgataagaacgtgatcttcaggctggtgctggtttgccggaaattcttggagtggtacatgtgctaaaagacttttagttttgagggaagggaaagtggaagataaaccaagtatatgattcttaagaaactgaccttttttttaaattgacctttttgttttaaaagtccgtcagcagaggactttacagtccttggtgccttttactgagaaatttcctttagcatctattttcattagtttttagaccaaagaagccaaacaccatcttatagttgacaatgcttcctgtatgatttttataccagataagctaaatgtcacctttatattagtgtgttattaatgttaaacttagttttattaaaactttgtagacatgtttattcaatttttaatgtcagaccataaggtaagatttttatagactctttttaaccttttataatctttcttgaagagcaggttagtgctttaagaaaaatctgttgtgtttttactttaatgtccagttcacagaaaaactggatgatacccctttaactttagctaatatgttaacacacagaattttctttataattaacattttaaaacttgcttaaaccttcaaaacaaattttttttaacctttcaatgtaggtaaaaatttacattcttatgcctccttataatcattttaccaaaggtatattttagtttccttatacaccttgcacataaactgtttcttcaatagtactcaggaggcctaattacttttaaaatatacaacatttcttgcataatttcttttttataactttttttctctttcacgacttttgcagataattcttcgacatgcctcaactttctgacttattacaaacatttctttctttaaacaaccagttaatttgtttcaggacaataatttaccatataacattctttttacataaattctgccccccctttttttcccttttttttttttttaagatgacaaccattcttttcaaaaagcaaacttgctttatgtctgtggaccagactgtctaaggccacaagattaaaagttactataatacatgttacactattaacttttagcaaactttacttttgttgaaaaccttgtaaatttgagattccaactatcctttgctattaataggaccttgtttagtccaaattaacttaaaattggtatagatggctttttttttttttttcatttacccagtaggaaacatctatcatcctgtcctgaagggagttcctcctaggtctggttggacctttgtatggtaattaagatttagatcccctgttaggaaacctgctgggttaagtgaattttcagcggttaatgttaagtctttttttttttttttttttaactcaggatacttctgaactggtgaggtgtgctcacaatgaggtttcctctaaattatttttctactttcttctgtgagcaaagcagttgccactacagattgaatgcatttgggccatctttgggttactgggttaaggatttttgataggaaggctacaggttgtcaggggcctcagtgctttcggactacgcccttgtttacacttacaaggtggtattggagtgttgtagggtcatggagaagaccttcaattatcaattatatttgactttctgtctctctctctctttggctttccttttgcctttgtctcttcctctctctctgcctctctctttctctctctctcttcttgactccctctttgtctctctgtctcttcctctctgtcttttcctctctctctttgcttctttttctctctgtctctttcctctctctctctctgctggtctttccttgcctctgcaagctgcttatgctgctgttctctcaaccactgtggggtggggggggggtctaaaaccagctgtaaccaagtgtctatatacaggaactggtctgggtgtcctggcttacaggttaccttgtgccatacctttgtaacacgggacctgtccaggcttccttctgatagtcaacccacctctaatgccagtctatcttacacaaagttttaagttttcctgctgtcatagtactccatagtctcccttagatcctttcttgaaatttttcaacatagttcctggtggggtgggcttactttgtgcctgacccatgctttcttgagacaagacaccatgctcacaccacatgcataccacaaaacaaagaacgggttaaaagggcacacacatacttttacagtttacaccaaaccagaatcaaaaccaaaatcagagtatcaagaaatccaagccaggtcaaaaccaaaaccaaagtatcgagcaatccaaatcaagtcaaaaacaaaaaccaaagtgctggtacaggcacattgtgggtgatcaggccacacttccactcaaatggagtaggcaagttacaaagaccagtcttaccaagtttcagatgtctggactccaagtgccatttccttcccagtgttcagccactgcattgatcctccgtgggggcctgccttgcaccactctgacaaggcattccaccgaggcaaatgcctacccaggagcactctcaggatccacgtcactcaagctggccggagttccccatagggatgctccacagggcaggcctaagccacctaaggggctgcctcaacggtccatccattaatcacctcgcttcccagtcagggaaccaagaaatgtagcaggacaagccacagacaaaacccctcagacaccaagttaaagaaggaagggctttattcagctgggagcttcagcaagactcacgtctccaaaaaccaagctccccgagtgagcagttcctgtccttttaagggcttacaactgtaaggggttcagtgtgagagggtcatgatcaactgagcaagcagggggtatgtgactgggggctgaatgcaccattaatcagaatggaacagaacaagacagggattttcacaatgcttttccatacaatgtctggaatctatagataacataaccagttaggtcaggcgtcatactttaaccaggcccagggcacggcgctgggctgtctgcctgtagatttcatttctgccttttagtttttacttcttctttctttggaggcagaaattgggtataagacaatattaggggtggtctcttcccttaataattataaaggaatcaattcaacaagaagagctacctatcctaaatatataggcattcaatacaggtgcacacagattcatgaaacaagttcttggagacctacaaagagacttagacttccatacaataatacagggagacattaccaccccactatcaatattagatcaatgagaaagaaaattaataagaatattcaggacttaaacacagctctggatcaagtggacctgatagatatttacagaactctccaccccaaaacaacagaatatacattgttctcagtgccacatggaacttactctaaaattgattgtataattggaagtaaaacactcttcagaaaatgtaaaaggactcaaattatatgatactgtctctcagaccacagtgcaatcaaattaaaactcaagattaagaaactcactcaaaactacacaactacatgcgaattggacaacctgcttctgaatgacttctgggtaaataatgaaattaaggcagaaatcacgaagttctttaaagtcaatgagaacaaaaaaacaatgtaccagaatctctgggatgcagctacagcagtgttaagagggaaatttatagcactaaatgcttacattagaaagctagaaagatctcaaatcaacaccctaacattacaactaaaagaactagagaggcaaaagcaaataaatttaaaagctagcagaggataagaaatgactaagatcagagcaaaactgaggaagatagggagatagagacacaaaaaaccttcaaaagatcaatgaattcaggagctggatttttgttttgttttgttttgttttgctttgttttgttttgttttttgagacggagtctcacacttgttgcccgggctgcagtgcagtggcaagatcttggctcactgcaaccttggcctcctgggttcaaatgattctcctgcctcagcctcctgagtagctgggattacaggtatgcaccaccaagcttggctaatttttatatttttaggagagacggggtttcactctgttgggcaggctggtctcgaactcctgacttcagttgatctgcctctcaaaatgctgggattacaggcatgagccaccatggctggcccaggagctggctcttttgaagaaattaataaaatacatagaccactagctagactaataaagaataaaagagagaagaatcaaacccaataaaaaatgataaataggatatcaccagtgaccccacaaaagtataaactactaacagagaatactataaacacctctatgcaaataaactaaaaaatctagaagaaatggatcaatttctggacacataaaccctcccaagactaaaccaggaagaagtcaaatccttgaaaagaccaactaagttctgaaatttaggcagtaataaatagcctaccaaccaaaaaaacacacacaaaaagcccagaaccagatggactaatggttgaattctaccagaggtaaaaaaaggagctggtgaagcagcattgttgtctggggtaaatacccagggttcatcatctaatgctgagaaggttaatgacacagacacacacacttggagtgtgtttaaagagcagaaagtttaatagatgaaagaaagaagaaagagagggagagagagagctttctcatgcagagaaagtggggcacccaaggtttccaggatgcaattgacttttaaaagaggcttgaagagggggtgattgatttacatagggttcaaaagattggtttgaccgggtgtaccatttacataacctgcaaaaaaacttgccttcccaccccaatcttttattatgcaaatgtggcctctacctggctggatccatgacaactgcacacgaggggacaaagaaaaggaagggggaattgccatattgggtggacctggctttcagtacagctgcccacgttcatctatgcagggttctagcttgcttatctatgcttgtagcttgacttttcaggctgctttatgttagaaaagagatggtttttggctgatttctattaaagaaaaatttcactgagaacatttttacacttgctaagtgactaaaataatttcctaataactgctatattactggtaccatttcttctggaactattccaaagaattaaaaaggagagactctcctcccttctcgttttatgaggccagcatcaccctgatgccaaaacctggcagagacacaacaaaaaaagaaaacttcaggccaatatctctgaagaacattgatgtgaatatcctcaataaaatactggcaaaccaaatccagcagcacatcaaaaagcttatccactacaaactagtcggcctcatcactgggatgcaaaactcatttaacatacacaaatcaataaatgtaagctatcacataaacagaaccaatgacaaaaaccacatgattatctcaatagatgcagtaaaagtcttcagtaagggctgggcatgatggctcacgtctgtaatcctagcaatttgggaagccgaaatgggtggatcatgaggtcaggagttcgagaccagcctgaccaatatggtgaaaccccatctctactgagaatacaaacattagccaggggtggtggtgtgcacctgtaatcctggttacttgggaggctgaggcaggagaatcacttgaacccaggaggtggaggttgtggtgagctgagattgtgccactgcactttagcctgggtgacagagcaagactccctctcaaaaaaataaaataataatactaataataaagtcttcaataaaatttaacattccttggctgggcgcggtggctcacacctgtaatcccgtaatcccagcactttgggaggctggggcaggtggatcacgaggtcaggagtttgagaccagtctgatcaacatggtgaaaccccatctctactaaaaatacaaaaattagccaggcatggcggtgggggcctgtaatcccagctactctggaggctactctgaggctgatgcaagagaatcccttgaacccaaaaagcagaggttgcagtgggttgagaccatgccactgcattccagcctgggtaacagagtgagactctgtctcaaacaaacaaacaaaattcaacatcccttcatgttaacaactctcaataaactaagtattgaaaaatcatacctcaaaataataagagctatttatgacaaacccgcagccaatatcatactgaatgggcaaaacctggaagaattctggaaaatcagcactagacaaaatgccctctctcaccactcctattcaacgtagtattttaagttctgaccagaaaaatcaggtcaaagaaagaaataaagggtattcaaataggaagagaggaagtcacattgtctctgcagatgacatgatgctatatctagaaaatcccattgtctcagcccaaaagctccttaagctaataagcaacttcagcaaagtctctagatacaaaatcaatgtggaaaaatcacaagtaccaacaataaacaagcagattgtgaaatcatgcatgaactcccattcacaattgctacaaagaaaataaaatacctaggaatacagctaacaagggatgtgaaggacctcttcaaaaaggactacaaactactgctcaaagaaataagagaggacaaaaacaaatggaaaaaatttcatcctcatggataggaagaagcaatattatgaaaatggctgtacttcccaaagtaatttatacattcagtgctattcccatcaaactaccactgatgttcttcacagaactaggaaaaactactttaatattcatgtggaaccaaaaaagagcctgtatagccaagaaaattctaagtgaaaagaacaacgctagaggcatcatgctacttgacttcaaactatacaacaaggctatagtaaccaaagcagcatggtactggtaaaaagaaaaacagacacattgaccagtgaaacaaaatagagacctcagaaataagaccacacgtctacaaccatgtggtatttgacaaacctgatagaaacaagcaatggggaaaatattccctatttaataaatgatgctggaaaaaaataaagtcagaaaaactaaccttctctctttctggtcatattatctatatcttatttagtcatttttatttatttcaattgctttcaattttagtatttgctttggaaattacttttttaatatgtataacattttcttggagtctatttatggacatcaatgctatttttcatattttgatatacaaaataaaacatcaatgtggatgtgatggcacctgcctgtaattccagcattttgggaggctaaggtgggaggattactttagctcaggagttcgagaccagcctggtctacatagtgtgacctcacctctaaaaataacagtaataaattagctgagcatggtagcacatgagtggggtcccagatactcagaaggctgagatgagaaaactgcttgagcccagatggttgaggctgcagtgagctgcagtcatgccactgcattcctgcctggctgagagagaatctttcttaaaagaaagaaagaaaaagaaggccaaggtaggtggattacttgaggttaggagtttgagaccagcctggccaacatgacaaaaccctgtttctgctaaaaatacaaaaattagctgggcatggtggcatttgcctgtaacaccaggttctcggtaggctgaggcatgagaatcgcttgaactcgaaaggcagatgttgcagcgagtggagattgtgccataggactccagcctgggcagcagagcaacaccttgtctcagaaaaaaagaaaagaaagaaagaaagaaaaagaaaaccacagagaataaactataatttttttttaatgtttgtaaagctctaattgcatagcagatttctggaagtcagtttccagaatccaaggctaatccctaagcattttatacatttctttctgcattgattataaaattcaggtttcccaacagaaatggaaaaaaataaagcatgaataacaatgagatagcacacaattatgataatggcaatcatgaaaagaaaaatttcaaagaccgtcaatgaaaatttggattaaatagatctagaaatatgaaatggtagagtagctttggaaaatagtttagtggcttattataaagttgagtatacacttattatgttaccaagacatcccactgctaggtcattactaaagtaaactgaaaactaatgctgaaatgaaactttttatggatgtctattgctcactttatttgtaattgcaaaaagctagatgtaaactagatgcttttcaacaggtgaatgaataaacaaaccagtgcatacctacaatagaatcctagttgtcaataaaaaaaaaaactattgatcgacatcacagtatagatgagtcacaaatgcatttctttaattgaagaaagtaaaatccagtttacagattatataatccaagtatatggcattgtagaaaaataaaattataaggattgataataatcagtccaggcttgatggctcaagtgtataatctcagcactttgggaggctgaggtgagaggactgtttgagcccaggattttgagaacagactgggcaacatagaaagaccttcctacaaaagaagaagaataaaaagagaataatcactgattgccaaagaatagatgagggtagacttaactacaaataggaggcatcggataattttgggggcaatgaaacagttctgtgtggtactgtgaagatggctatgtgactctagacagttttcaaaacctatggaactgtacatcacaaagaataaattttcctctctgaaaattagaaaaaacaaggattgggggaaaattcagataaaatgcagggagtaaaaagaagagttcacccttactagaaatgtatcacctaaccctattgaagaaggttggaatgaaaggacttggtgtaaatcactttgaataacactattttgattaaatactgcaagactcaagaactgaacacaaacattgtgttctggtatgtattgcttgtctataagcatatagactagcaatttttaaaagcactctatatgttagtatgtatatatatatatatatatatacataaataaatataattagtgcctgcatctctctgaagttgaaaaaaaagagaattctagaatggagttgagaatattttgataaatgcatgtatcataacatatctattgagagagacagaaagagagagatgtgttcatacaggagtcaatattaatatgtacctttccaaactctgtttgctgagaggttgcagaagcagtgacaccccaatattaatgggcacacctagctctcatatcatggtttctaagtactattcttcaacaaaaaaagcaagactacttgtaataatagacaattctagcactggagtggaaaatccaagttaaggtagagtattgttaagctaaaaagtttaaagtgctttatgaacaacagaagcagccatgtcagagaaagtcaacctgaaagacttcccaggagcccaagctggaaaaatgtgaaaaacacaataaacattattagcattggattaacacccagagaattaaaaaaaaatccatgaatccataaagatagagaaaaatacaaataagaaaaaaagaaggccagtcgccgtggttcatgcctgtaatctcagcactttgggaggctaaggagggtggatcacctgaggttgggagttcaagaccagcctgaccaacttgaataaaccccgtctctaccaaaaatgcaaaattagccgggcgtggtggtgtatgcctgtaatcccacctacttgggagtctgaggcaggagaatcatttgaacctgggaggtggaggttgcagtgagctgagatcacgacattaaactccagcctggacaacaagaatgaaattccatctcaaaaagagaaagagagaaagagaaagagaaagaaagaaagaaagaaagaaagaaagaaagaaagaaagaaagaaagaaagcagtagaaaaaagaaaaaaattttctttagaaaattccaagtatactaatcaatgtagaagataatgcaaaatagaaaatcaccactaagacaccacagtaataattactgtagacaagatgtacttaaaaatgcaaacattgtggataaaatttaaaggagaaacagtgtttctgttagccccaaagtatctgcctcaaatatttataaatagccccaaagtaatagccccaaagtatctacctccaaatatttataaatactatttcctctcaatttctttataagacttatgactaaggaaaaattataacacagtattgtgagatatatgtgtagatgtaaaatatatgaatagcacaaacaatagaaggaagtaattgtaactcttcaacagcaaggttttcatattttacatttattaaaatagtacagtataaactctaggtagattgtgatatgttacaaatgcatatagttatccctggagaaaccactaagaaatgtaaggaggtgtcacttaaatgctattaaaggaatttaattatataccaaaaagtatttgtacaagaatgtttatagagcttttagtcataatagcttaaagcagggaacagcctaaatatccatcgctagaaatatagatgaacaaattatatctcattcatacaagagaataccacccagccatagaaaaaaatgaactactaaatcacacaacctggatatatctcataaacctgccagataagacaagcttgaaataaaataatacgtattgtatgatgtcaagcaaaatgaaccaatgattaaaaagaaaaacacctctggtagagaataaaatcatctggaaaaaagcatgaggaaattatctgataattttttaaaaatccattattctgtggagtcactcatgctaaatgtgatataaactaaaaatgtaaggaaataggtgatcctaaagcagttcgggttttgttttcttctgtaaacagcagattttaacacaaggagttcctttctactgtaattctttttaaaaataataacctgaagtccttgtttttactttacaaaacccacagttctgctatttcacagtgggatttgagactaaataagtatacttttgatggtaactgatgctatcaatgtctaaagtttgggtctgtctctcaaaattgggaagatgaccaaaaaggagaaattattaaatcaattatagcctaaagctgccttcttttctgtttaatttttgtcaataggttctctgtacatagcaaactgaaacctaacttgatatgtaaatagactgtaacccactcttgtaccaactactgtgtttttggcaataaaaggacatcagctgtttaaaccatgttcgagtaaggcaaatctcgagctgtaatcaatctggctgtttctgtatctcacccccattttctgtatgtcactttgctttttctgtccataaatctttttccaccatgtggctatgctgcagtctctctgagcctactctggctccacaggctgcccaatttgcaaatcattctttgcccatttaaactctttaaatttaatttttctacagtattttcattttaaaagttttccattttattctatgatgaaaaataaataatctgttgttggcatttgattttctaaacttatccatcacctacaaatataaagtattctttgtctttttaaaatccttctgcaatttctttctttctttttctttctttttttctgagacaaggtcttactctatcacccaggctggagtgcagtggtgtatccaaacatggctcactgcagcttgaccttccaggctgaagtgatccttctgcttctgcatctgccacctgagtagctggggttacaggcatgcaccaccatgtctggctaatttttaaatttttattcatgaagacagattcttactatgttggctgaacttgaactcgagctcacgttattctcccatgtcagcctcccaaaatgctaggattacaggtgtgagccactgtgcacttctgcaaattcttgacaggattattcccaatgataaacagtactatattggcacaaatgtaaaaggaatgtaggctggctgcagtggctcacgctagtaatcccagaaccctgggaggccgaggcaggcagattacttgaggtcaggagtttgagatcagcctggccaacatggtgaaacctgtctttactaaaaatacaaaaatgagtcaggtgtgatggcaagcacctgaaatcccagctacttgaaaggctgtggcaggagaattaattgaacatgggaggaggatgttacactgagccaaaattacactactgcactccggcctgggtgacagagtgagaccccatctcaaaagaagttaaatagattaataaaactaaaataaaaggaatctggcctctatcgtagaagtgtcactctccaggatttcaagggtctagggcagctactttagtagtgtcatctatggaggtggatgggctttggagtctgacagagttgatcctgagtctcagcccagccacttagtagctgtgtgtctttggacaagattcttgatgtgaaagagttctataaaccacatatgcaaaataaaaaaaaaaaaagcagaatgacactgatttcaaaaatggtagcaatttctagttttttctgtatccatgcccattgccaggtgcttttaaagctgttcccatcaagatccaggatgttttccaaaccctagattttgctggccttattcactcagggcagtagaaacctgtgaacatgacaatgtaacagtttgaggcctaggctcatgtggggaaaagcaagagagatcagattgtcactgtgtctgtgtagaaagaaatagacatgggagactccattttgttatgtactaagaaaaattcttctgccttgagagtctgtgaccttacccccaaccccgtgctctctgaaacatgtgctgtgtcaaactcagggttaaatggattaagggcggtgcaagatgtgctttgttaaacagatgcttggagtcatcaccactccctaatctcaagtacccagggacacaaacactgcggaaggccgcagggacctctgcctaggaaagccaggtattgtccaaggtttctccccatgtgatagtctgaaatatggcctcgtgggaagggaaagacctgaccatcccccagcccgacacccgtaaagggtctgtgctgaggaggattagtacaagaggaaggcacgcctcttgcagttgagacaagaggaaggcatctgtctcctgcccgtccctgggcaatggaatgtctcggtataaaacccgattgtacattccatctactgagatagggaaaaaccaccttagggctggaggtgggacatgcgggcagcaatactgctttgtaaagcattgagatgtttatgtgtatgcatatctaaaagcacagcacttaatcctttaccttgtctatgatgcaaagacctttgttcacgtgtttgtctgctgaccctctccccacaattgtcttgtgaccctgacacatccccctctcggagaaacacccacgaatgatcaataaatactaagggaactcagaggctggcgggatcctccatatgctgaacactggttccccgggtccccttatttctttctctatactttgtctctgtgtctttttctttcctaagtctctcattccaccttacgagaaacacccacaggtgtggaggggcaacccaccccttcagctcaaaaggtcttgaatgcttctgtttttctttcagaatgctaccatttccatgaaaaatggccgatgttagcaagctggaggataagataccatggggaggagaagcaaggtgcccctgttgacagccccagaagcagaagctcatccccagaagcacagctgcctattcaacaaacagctgaagatacatgtctggaggagctcagctgagacaaaaagaacagcctcactgagcccagcctaaatagctgaccatctcaattatgggcaaataagttttgaatgatttgttatgctgcaatagctaattaatacatgcacccagtgcagacaggatgccaggattcattgacaagttgattactagttctcttctaacagtgggcaccctataggtactgatttttccccctgatttgaagttggatgccaagtaagagaatgctgagtaatgcagaaatatatatggatatgtatgcatgtaattggtgcctatactcacacagtcccccataccacaggagaaaacagataaccacggcctgacattagggccaaggacaaatagaaaagtaagtttgcctttaatctgttttcttcatatctaaacattggaggtcaagactgtgcacaggtttgaagacatagagatttcttctcctgtggccttatcatcctttgttcaccttctgatctctggaagaaaggtggaaaatgggtggccagcagtggtctacctgtggttgtttttttcttgctgtcctctgatttttctatggctactatctgttcctccctcagagctgaagagaaatgttggtagggaaaggctcttttttcagctttggcagaaaagttttttcaggcccttcgctcccgaggtcagagctgcacttcaatgtggcagctactggccatgtgtggcgactgagtgcctggaatgtggctggtctaaactgtgatatgctggaaaggtaaaatacagagttagtttcaaagatgaagttccaaaaaatatctacacttcatttataatttacattttgcttacatattaaaatgataatattttggatatactggtttaattaaattgctacaataaataccgcattttttgtttgtttttctttttaaagtttggctactagaaaatttaaaattcacatgtagctcacattttatttcagaggattgccttctttttaaaatctcaggcaatctgatggaaaaaacagaagtcagggaggtcataaaatcagaaatttttagataatttttattatattcttttcatttgtgtataaccatataatacattatttacgaaagaatatgaccttatacaaaaggttaaatgcaaataccctctggggttggcctggcttacttagctcagggaagaagccctgcctgaaaaggctgcagcctagactgtcactctttacttttttttgggggggggggcgggggacagactgtctctctgtcaaccaggctggagtgcagtggtgcgatctcggctcactgcaacctctgcctcccgagttcaagtgattctcgtgcctcagcctccggagtagctgggattacaggcgcccgccaccacgcctggctaatttttatttttagtagagacgaggttttgccatgttgtccaggctggtctccaactcctgacctctggtgatccacccgcttgggcttccctcccaaagtgctgggattgcaggcgcgagccaccgcgcggcctatcagtcttcattctgtccagcatctgatcacatcttttgtcactcaggatctgaggaggcggggatttaagaattatccaatcagggactctgggctaggaaccgtccaatcaggcatgcagctggagcggaaaaggcggcatccgagatgtggcggggccgttgtttctggttgcagccgcagttcccggtctcgccttcactgctgtgtgtcctcagcctctgtggccctgtaacctgcggcattggaagatccacagctaacatgccaggtgcccctggcagcctagaaatggtgagagtgccgggtccgacatcccgagaaggggaaggggctgattggaaccggtgggaagtggctgtggcgggactccggcctccccgcagtcagctccacaatctgcgcctggagttctttcccatctcggcctcagtctccttcagccataagatggcgaatgcgctgactgcgggaccctgggcgacctgtctcctccatgcgctgtgactgtgccctggcctggagccctctctgggccgctctgcacccgcatggccgcgtctctccgagattgtgcagggaccacgggaggggcgtcaggggagaatcctgactccggatgcgggttcatgaatgggaagagctttggtccagtgaggtttccagtccctcttttcttctgttaaaaatttatggcggtcaccactaaagtaataaataatttaatcaaagtgattcaaaaattgtagagcacccagctatggtttgtagtttatggtctatggaagggatttgacggaaagatttttttaaggtgcacaatgaagaaaaccaaattcagtaattggttatgtacagttacgtagtttctcagtttgtacaatcaagatggaaatttcccgtttatataatcagaggttaattgtagtttatagttggttaagcctgagttttgtttcccccaatgtataatttacaaaaaaaaaaatgcacttgaattagatttttttttttctttttttgagacggagttttgctcttgttgcccaggctggagtgcaatagcgcgatctcctctcggtgcaacctccgcctcccgggttcaagcgattctcctacctcagcttcctgagtagctgggattacaggcatgtgccaccacgccgggctaattttgtatttttagtagagacgggggtttctccattttggtcaggctggtctcgaactcccgacctcaggtgatccgtcctcctcggcctcctaaagtgctgggtttacaggtgtgagccgctgcgctcggccgaattagattttttaaaaagtagatatcagggactagagccacctcagtctaattgcctgccacttaattattcttaattattttcacactcctcggaggactgatttttttttttttcccttgcattttttacaggtatcccaaggagagtattatgtgtactcccaaacccccattcctgcagcctatctctggcttgcagtaaaatataaaatttccagttcattgttaccttcccaaatgtcaattttttcctctctgattcacattactatttgtcctttttttttttttttgagatggagtctcgctctgttgcccaacctggagtgtggtgtcctgatcttggctcaccacaacctccgccttccgggttcaagcaattctcctgcctcaacctcctgagtagctgggactacaggcatgtgccaccatgcctggctactttttgtatttttagtagagacagagtttcactatgttggccaggctggtctcgaactcctgaccttgtgatctgctcgcctcagcttcccaaagtgctgggattacaggcgtgagtcaccgtgcccagcctactatttgtcctttagtgtacatttttgataccatgttttaattattttttaacaaagcattggatggcacttttcctaatatttgttttctgtttgtaaatatttcctatgagaagaaagcaaaaaattatcccctgacactgcgttgtaaaaagtctttgtactgtttttttttttttttttcctcctaggcccacagattttatcagaatgtttcgggggtaaatgttttcctttggaaactttatggagtgatgtgttttcagccattcttcagatttttttcctggtcctgggtttcagtactgtctgggaattaactaaaataccccccatggctatgtctgctagagtgtctagtgaatatcagctcctggtcattttctcccatgggacaatctgaggtatggagtgtagcctttcagggaagcaggcggatgccctggaattgagaggaatctcctggcatactcttcctttgaaaagctaacccttgagacattaagattgtcttcacccaacccagcttccaattattgaagacccaacccagcttccatttcttgctggtcagccaatcagttgctggtattgcgggaaaaagcattgaaataatttctgccccctgcattctctaagggggcaaaacaatagggaaagaaatataatgaaaaaatagtgaaagaaaaatagtgcgaatctttgaaatcaaaaataatatcccaaaagaaaaaaaaacagtgatccagtgagatggtgtaagaacttgcaaagtaaaatacatctggggcactcactggggcttaattcagagtctcctgagaaggggttattgggcacttaagtgagcagaatggagtgggagaatctctcaagtgattggatggcctgattgaaacatgagtcagacacatctgtaccttgaaaagatttggtcgcttattttgacctcagttttttaactgtgaattgcattttgttagtagggattgaaagaaagataagaaaatatttaccaagggcaaaaaagagatggatttcagaataaaattaatatttaattatatattccatttgttaatttttttttttttttttgagaccaagtctcactctgtcgcccagactggagtgcagtggcgcaatctctgctcactgcaacctccatctcccaggttcaagtgattcttctgcctcagcctcctgactagctgggactacaggcgcccgccaccacacccggctaattttttgtatttttaatagagatggggtttcaccgtgttagccaggatggtctcgatctcctgaccttatgatccacccgcctcagcctcccaaagtgctggtattacaggtgtgagccactgcgcccggcaaaaatttgtatttacccttttctcagaatgagtttaggaattttctctggtttgttttttatggctgggtgtttttaaacaatttcaaggcttaacttttagaatgctaccagggaaaaaaataggaaaaatctctcttccattttggcttcagaaaatgcacacatttccacaagaaaatatggtaggtaattggtgagttatgtagattcatgaaaacatcagttcctctttttgcagggtaaatttgtaaccgtgaatatctctattctatatcctgttatattgctgtctgagtttcatgctaaattttatgagctgaaactttgtaccctctagaagtgttcccatatgactgtttactacatgatttttaatggaaatagtaaaataatatttattgtctgaaaggaatagatacttttgcttatcttactgagacataaaatgtaagcaccttaaaattttcttcccttacatgtacactgtgttagagtaattctgctgaatttttcaaacacttactttcaaaaaccacatgaataactctgacatgaaaattaaagcctgagcctagtgactctaagctaaggctaatactgagcctgcaaaaggaagttattaaaggaccacttagttttttctggggagtcttctctgcagatattccagcctgctcaccccagccatggaagacgcctttatcctgagagaaactacatagccttggaaagttggggacccacagccagatgcagttaaggttaagatgaaaggggattgggagggtcttactgaagatgaaattgttattgttttgtggtagtttctagactttgtaaagtaaaacaaagttagatttatgttggaaaaagaattgaattccaaaagagtattgcaagaggacgaagtaccaactctgagatcttcaaggattgcaaagtttaggcagacaagggccttgtttcatatggaagagcaaacagtattaggaggtgggaggggatggcaaatggagggtgaaagaatgagattttagatcagagaatgttttaccctgaagtcatcatgttcttaggaactacataaaatggggttgtatgttgactcagactgagggtagcttaaagttcagaaagctgttgaaaggaaataaacttaagtaatgtttgattaagaagtattctaggttgaccactgaaaacaaattcagctgatttatttattttttttaatgagaaaaaagagacagtgtgcagagtctgtgtctggctatgtgacaggtaagaaaagagcaccatctaagtcataatgggaagggtatttctttctgacttttcctggattgtatcttttctaataaactgataaatgtaactaggttgttttcctgagttctgtgagtagctgtataatattattgaacttgaagaaggttatgagagtccccagtttttaaacggtagctcagaaacagatgggtctatggggtttgtgactggcatctgcagtaagaacaatgttgtgagactgagccctgaatcagggtctgtgctgactctgggtggtgtcagaattcaaatgttaggcaatgagttggtgttggagaattgcttggtgtttaccaagctctacaaatttggttccagataaaagatatcacagaggcctggtctggaatggatctctgggtgtctgggaatgggaggctctgcttttctctacacaggccatcacactgcccattatcctgtgatttcagatctcctcccggggtgagagaggataaaaacttagagtaaaaaagttctgataacagaccccctttttccactgctgccaccacaggattcccaccttcttacaaacatatccactagacattgacttgtccacacccctcgtaggaataggtaccacccccagcaatttcactacggcatttttgatcctagcgtttcttgccaaaaactcacaaaagtgtctacaagtctcctggcatatcccaacccccagacactgaatctgcagcagcaacctgttttctccaccaacctggggttctggacaacctgttcataatctcatctgcctgcatggacccagaaattaatcagagtagagtcacacctgggccactatctgtagcacaaaccagtccttccacctgcattgccctctccccaacccataaagttcttttatgttttgtttttgtttttgtttttgagacagtttcattcttgttgcccaggctagagtgcagtggcacgatctcggctcactgcaacctcagccttctggtttcaagcaattctcctgcctcagcctcctgagaagctgggactacaggtggctgccaccacgccccgctaatttttgtatttttagtagagacagagtttcaccgtgttggccaggatggtctcaaactcctgatctcgtgatccgcccacctcagcctctcaaagtgctgggattacaggcgtgagccactgtgcccagccagcgagttttttgttttaacttttatttttgattcaggggtacatgtgcaggtttgttacataggtgaaattgtgtcggggggttggtgtgcagattattttgtcattgaggtattaagcacagcaccacacaggtattatttttctgatcctctttgtcctccatcctccacccttaactagaactcagtgtctgttgttcccctctttgtgtccatgtgttattatttagctcttactaataaatgagaacatgcatttggttttctctttctgcattagttttgtaaggataatggtctccagctccatccatgttgctgcaaatgacataatcttgttcactttttatggcaacacagtattccatgatgtttatgtaccatattttgttttcattaaatcttttattttatttatttttggagactgggtctcactctgtcacccaggctggagtatagtggcatgatctcagcttactgcagcctcaacctcctgggctcaagcaattcttctacctcagcccccaagtagctgggactacaggtgtgtgccaccaagcccagctaatttttcttgtattttttgttgagatggggtttttccatgttgtttaggcctgtcttgaactcctgagctcaggcaattcacctgcctcggcctcccagagtgctggaactacaggcatgagccaccacaccttatcataccatattttctttatttagtttaccattgataggcatttaggttgattccatgtctttgctattgtgaatagtgccgcaatgaacatgtatgtgcaggtgtctttatgacagaataatttatattttattgggtatatacccaattatgaggttgttgggtcaaatggtaattctctttttagttctgtgaggaattgccacactgcttttcacaatggttgaactaatttacactcatgccagcagcacatagccgtttctctgaaaccttgccagcatgttattttttgactttgtaataacagccattttgactggtgtgagatggaatctggttgtggttttttctttgcatttctctagtgatgagtatttttttcatatgcttgttagccacatatatatcttattttgaaaaacatttgttcatgttttttgtctacctttttttttataattgagacgaagtctcactctgtcgcccaggctaaagtgcagtggcataatctcagcaaacggcaatcttcacctcctgggttcaagcgattctcctgcctcagcctcctgagtggatggaattacagggacttgccaccatgccctgctaatttttgtatttttagtagagacaaggtttaaccttgttggccaggctggtctcaaactcctgacctcaagtgctctttcctccttggcctcccaaggtgctgggattacaggcgtgagccaccactcctagccttttgtctatttttttttttttttttgagacagtttcgctcttgtttcccaggctggagtgcaatggtgtgatctcggctcactgcaacctccgcctcctgggttcaagagattctcctgcctcagcctcctgagtagctggaattataggtgtccaccaccacacgtggctaattttttgtatttttagtaaagacagggtttcatcatgttggccaggctgatctcaaactcctgacctcaggtgatccacctgtcttggcctctgagagtgctgggattacaggcataagccacggagcccagccaccttttgtctaccttttaaggaggtcgtttgtttgtttcttgtaaacttaagttttttatggattctggatattagacctttgtcaaaagcatagtttggaaatattttattttattctataggttttgtgtttactctgttgatggtttccattgctgtgaagaagatatttagtttaattaggtcccatttgtcaattgttgctgttgccattacttttggtattttcatcataaaatctttgttagttcccatgtctagaatggtattttctaggttatcttgaagggttttttataattttaagttttacatttaaggctttaattcatcttgagttgatttttgtatatgatgtaaggaaggggtccagtttcaattttctacacagtgctaggtgtttatcccagcaccatttattaaatagggaattcttcccacattcctcttgttagttttgtcaaagatcagttggttataggcgtgtggcattatttctgggctctctattctgttgcattggtctgtgagtctgtttcttgtaccagtattatgcggctttggttacagtagccctattgtatagtttgaagtcaggtaatgtaacgcctccagctttgttctttttgcttaggattgccttggctactcgggctcttttttccttccatatgaattttaacatagttttctatagttctgttaagaatgtttttggtagtttgataagaatagcattaaatcatttctttttttgggcattatggccattttaatcattttgatcttttctacctatgagcatagaatagttttccatttatttgtgttatctcggactttttttttttttttctttttctttttttttttttttttgagtccgagtctcactctgtcacccaggatggagtgcaatggcacagtcttagctcaccacaacctctgcctcctgggttcaagctattctcctgcctcagcctcctgaatagctgggattacaggtgcctaccaccatgcccaggtaatttttgtgtttttagtagagatggagttttactgtgttggccaggctggtttcgatctcctgacctcaaatgacccacccggctcggcttcccaaagtgctgagattacaggcatgagctaccgtgcctggccgtctgtgactctttaagcagtgttttgtgattcttgacatagagatctttcacttctctggttaggtgtactcctagatatttgtgtgtgtgtgtgtgtgtgtgtgtgtgtgtgtgtcagttgtgaaggggattgtgtttttgatttggcttttggcttgcatgttgttaatatacagagattctgccaatttttatacatttattttgtattctgaaattttgctgaagtgatttgtcagtttaaagagcttttctgcagagactgtagggttttctagatacagaattatgtcatctgcaaacagggatagtttgacttcctttcttcctgtttgaatgcctttcattttatctcttgtctgattgctctggccaggacttccaattctcttaaataggagcggtgagagaaggtatgccagttttctttcttttttttttttttttttgagacagagtcgctctgtcgcccaggctggagtgcagtggtgcaatcttctccgctcactgcaagctccgcctcccgtgttcacgccattctcctgcctcagcctcccgagtagctgggactacaggcgactacaggcgcgcaccactacgcccggctgattttttgtatttttactggagacggggtttcaccgtgttagccaggatggtctcgatctcctgacctcgtgatccgcccgtctcggcctcccaaagtgctaggattacaggcgtgagccaccgcgcccagtcgatatgccagttttcaaagataaacgctttcagcttgtatccattcagtatgtttactttgggcttgtcatagataactcattattttgaagtgtgtactttgaatgcctagtttgttgaggattttaaacatgaaggctgataaattttattgaaatctttttctgcatctattgagataatttttttggtttttatctttaattctctttatgtgatgaataacatttattaattgttgcatgttgaaccaaccttgcatctcagggataaagcctacttgatcatagtggagtagcttcttgatgtgctgctggatttggtttgccagcattttgttgaggattttttcatcaatgtttatcaggaatattggcctgaagttttctattttttgtttcatctctgccaggttttggcatcagaatgttgctgtttctatataacgagctaaggaggagtcccttcttctcaattttggaatagttttagtagaatggttcaggcccttcgttttacgtctggttgaattcagctgtaaatttgtctaatcctgggctttattttggatggtaggctatttattacttattcaattttggaatttgttattggtctattcaggaatttagtttcttttttgttcagtctttggagaatgtatttgtctagaaatttatgtatttctattaggttttttagtttgtgtgcagacaggtgttcatagtagacttcaatagttatttgtatttttatggggtcagtgataatttctcttttgtcattaactgtttatttgaatcttctctttattcttcattaatctagctatttaccttatttatttatttcaaagatttatctcggatttcttgttcttttgtatagtttttcatatctaaatcttcagttctgatcttatttatttattttttttgtctgctgatagcttaggagttgctttgctcttgcttctctcgttcttttatttatgatgttaggttgttaaattgagatgtttttgatgtgaccatttaatgctattaatttccctgttaacactgccttagctgtgttgcagagattctggtatgttgtatctttgtttcaaaaacttttaaatttccaccttaattttattatttacccaaaagtcattcaagtgcaggttaatttccatgtgattgtatggtttcaagtggttttctatgtattgaattgtaattttgtcaagctgtggtctttgtgattggtatggtttgaggatttttgaatttgctggggattgttttatttctgattgtatagtcaatttgagagtatgtgccatgtggtgatgagaagaatgtatattatgatgtttttagatggagagttctgtagatgtctactaggactctggtcaagtgctgaatttaggtttaaatatttttgtttattttctgcctcaataatctgtctaatagtatctgtgaggtcttttagccttctactattgtgtcagaatctacatctcttcttaggtctctaagaacttgttttatttatgtgtaccaatacattttttataacacctttttctcttctgttttttttttttcccataagcatattttcaagtgcacacagtgtgcccaaggatactccttagattttgagtgtctgctgaaattcagatgtccaagaatttaagaatatatcaaaagacctggcttttgtaggagaaaatacaaattagaaataagaggatttattctcctataggaaaataagaaaatatattttgcttatcttttttaaagcatttagattttatgtagatatttttctctacttttttgaaatatatataaatcatattaaaacaaaatgaacctcttattattctttgtgactcaggattctttttatttagattcattgctttgtttttgctttggtgtagatatatatatatatatatatggtctttaaaggagacaaagatttgtttagattaaagctcatattaagaacacgtaaggctgggcgcagtggctcatgcctataatcccagcactttgggaggccgaggcgggcggatcacctgaggtcaggaatttgagaccagtctgaccaacatggagaaactccgtctctactaaaaatacaaaaaattagctcggcatggttgtgcatgcctgtaatctcagctactcgggaggctgaggccagagaattgcttgaacccaggaggtggaggttgcagtgagccgagatcaccccatcgcactctggcctgggtaacaaaagcgaaactccatctcaaaaaaaaaaaaaaaaaaaaaacacaaaacattgagcacaaagataggatgaaatttagcaatacagaatgataaaagctgaaagatactgagtacatttctttgacagaaaaccgattatacaaggtattagcatagttacgtgtagtgtttgtagacaacctgcattcatataaattaaacagcattttcttcagtagtatgaatataaggccaaaacatttactttgactgaatactcattaaatagtcattttaatattgctgttcatacttttgaaacatataaagtatatatacatataaaaaatatagtgttttaactgaattatggctacagacaatttaaaaaattcttacatgccttatatctaatacattagttatttatacttagatatttatttctaatatccaaataaaatttactaccaaattgctaaagtagatattagtctgacatgtttattaacttatctaatagggataactataggtaagcataattacagtgtcttcttttttgagacagagtttcgctcttgtcaccccggctggagtgcaatggcatggtctcggctcactacatcctccacctcctgggctcaggtgattctcctgcctcagcctccctagtagctgggattacagacacccaccaccatgcctggctaatttttgtatttttagtagagacggggtttcaccgtgttgtgcaggctggtctcaaactcctgagcccaggaagtttgcccaccttggccttccaaagtgctgggattacaggcatgagccaccatgcccagcctatttatagcgtctttcatttcactatgttggaatgctgctattacaggagaaataaacacagatgatgtggccaccgcaaaaccataatagctctttagttagctatgtggcaagcttaaatacattccactatatgaacaaagtcagattatacatcttcatcaaaagtgctggtggaaattgtgagatgtatttcaatatataaccccccattcaatggctaggagatgagagagcagcagagatggaagagaaatcttataaaattctgctgagaatatatcccttttcttcataatgctcatgtttctcatgctgagagtagctgtgcactttggttgtttagagagaaattccttttaagagaatattttctggctgacttgatcaatcttatatctaaattgagtttttgtttgtttgtttgtttttgagatagaatctcactctgtcacccaggctggagtgcagtggcgcaatctcgactcactacaacttccacttcccaggttcaagtgattttcctgcctcagcctcccgagtagctgggactacaggcttgtgccaccaagcctggctaattttttatatttttagtagagatggagtttcaccgtgttagccaggatggtctcgatctcctgacctcatgatccacctgccttggcctcttaaagtgctgggattacaggcgtgagccaccatgcccggcctaaactgagtttttacttaaaatgcatttaacttttttttttctctaagcataatcttgctcagactgagagctgtttttctgtccaatgctttgggtgtctgcactattaaatattccctgttgtctgtgaatgaggtgggctgtcacagtgagaaattttggagctatctgtacttggacttaatgttggaaatccagcagtagtttttccatgtcacattgtaaataaaaactgaggctgaattactgttccaatgtccattaatgtaaaggtgcagttctccccaggaggcctgcaggctctcctcctgcagctcaggcttccctctctggggtgacactggagtgctgctgtggcagttgtggtttatgtaagatgtgagctttcagatgtgagccctgtgcagtgtgctctgcctcaatggcagatggtagtggtcaagagaggacactagctaacggagagggcaagcaggagagatgtagccaagtgctcagggagtagagagccattgctttaaagtgtaaatagccaaaaagatagcactctattcaaccatttttgtaggagattgagagcctaccttcagcaggcacctggattcaagttgcaaaattacctcctttcatgaagatgtgaaaagtttattttgtcattgaacataactgattagcctgcatggctagccttcccaattaccaggtgaatttaggatgaactgtgtatgacatggtgctatacatttttctacttgtgaactaattacggttactgtctttctatcttttcagtctcttaagcagattgactgtgatgcatgtcacattcaggtttaattgtgtaataaaacagttttatgtctgttctattgtggagtttctctggggctgaagaaaatttatcttttaattatgtttcacaaaaactgtctagaattatcagacatgatatataaatataaggtgccacccaagctttactctagaggaaactttccctctcaggctatcagtcaattcacaattgtgctgcaaagtgcatactgtcccctaaatatgcaggcagaattgcttctctgccaatttggtatctttaatcctccacagtaacttttagagaagctagatcagaattctacaaacttcacagggcagcaatcaaccattttatgtttttcagtgactcttgtatcttccgaactgaaactgattcacagactatggggcccagaaacccaatcagagtaacatatgtgcattgagtagacatgtacacttgggaatctgtacttcctttttcttcatcttgctaaaatgcccacaaatgtgcagggaaaacctgctgctatcccatccattcagaacctaaaactgcaacttcaaattctgaatccaggtcttcagatttgagaaaaaagaaaaactttctttctgagagatgcaagtccttttggttgtccaacttatagagacattaaaatgagagcagaattatgtttctctttttgttttttgaactatgtattcatcttttgaagctgtttgctattgccacaagtagctatatattaataatgcacactggacactataacttgtaccgtaaaacttaatggtgtatatccaatcaataatcaatgttattcctgtaaataataaaaatttctgacaaacaactttgtatcaacccactctctgtccatcttttttagcctttacaaatcaacttgtaatcacactgctaatcaagtgtatgttgcgggcaacttgaatatttgctcccaggttacagtcctcaagcttggcccaaataaactgtcaacttaaatctatattttctcagctttttcgttttaggtagacatatttagaatgtgccagagtagtgtctatgatgagatctctcctttgattgtactctgtttgctgtaacacccaaggaggcagagtctggttgatcccacctggaatctgcacataagatctggcctctgcctaagatttacaagacagggccaaactttgaattgagagtatgcagaaaaccagcagaagacattttctgtattgtgagatgtcaacgtagagatcttaaatcttttctttgagactgtggctctgtgagattttcagatcttttccagtgacctgttacaggtatgtgagagactccaggtataaataaaatctgatgacagaatctgtaagtataaacaggcatcttaggagtgagagatcaaggccacagagtaaccagagccatgactacaactatacctacctgtaaaatgtgatactggagtagagtattgttatttctcttacccaagagctagcaaatcagaagaggtgatctagattctggagcttaaccagggcggttccattttctatttataaccagcctgagtctcttctgcctggctcatcattgggtcattagcccagagtcactggaaaccctctcacaatcacctaggcatctttgagacatttgaggatgtccagagcagaactgtgtcaagctgacaaaagtggttaattctgcttctgtctcagtataagagaaatgagtcatcctgtgtttgttcctcccctcatacaagagatacctttagttggtacccagacaagagtttctccagtttcttggtacttgggtgaaaaacaagaaggaggtcctgagactcaaacaggtaaactaatagcttccatttcatgtggccattaaaaaaatagatgagggagtcatggtccctaccacccaggaacttatagtctagactagcaactgggtacatggttgaattaaacgtcatcatatcattggtacaataaacagatgtgtgcagaaacgcttgggctttatttggactactttatattcttctgacttctgatgtcatcacttgaagggatgtttatgtttatttctatttattttaccttggtagaatacatatgtatattttaataaaattaccctaggaaccataaaagactggtttaaattgcttattagtatatgtcataaaattgggcactgtctaaaaaaatatttaaattacacagattctgggatttaagtgcatcttaggtaagcttaggaaaaacaaaactggaagcactcccagtagcatagagaacagaattctacatagggtccactccctggccaagttctgtttagatccactgtttttggaggccttatttaggtcaggtcccaccctggagtcttacctcacagaactggataaaagagattagagttttggctggggaatcctgcttcatttctagagcgggagtgcagtggcgcaatctcagctcactgcaacctccacctcctgagttcaagtgattctcctgcctcagcctccagaatagcgtgccaccatgcctggctaatttttgtactattattagagatggggtttcaccatgttggccaggctggtcttgagctcctgacctcagatgatccacccacctcagcctcccaaagtgctgggattacaggagtgagctactgcgcctggccttttaagtatctttatgcagctgatgtgcaccagtgatcacatttaatctggcacctgcctttctttcttagattttctttgcatatatctatctttggaaaatgaagtctctcatctttgtttacaggccagaaaaactgggaaaaacacaggttcccccacttgctgaatgtttgacaaaagattcttttttgggccaaaaacaggcatcactggtgagcttgtcagaaattcagaaactcagactttattctagatcttctaaaataaatatgcataacaagatctccagttaattgtacacattaaaatttgagaggtgtcttctaactcagcatgtctttttgatctgaaaaatatacaagacttattctgtatgatgtaaatatagcacaaaaaatgtacatgtttgttatcatgccattagttttatactttattatccagaaaggtatcttatctacactggtgttgcggatcttatgccattcttttttctcagaatttgagactacattagataatatttctgtgttgaaaattattttattggatatgttcggtcatccctataagttagaatctgttctctttattctctcatttcaccttgagtcaaattaaaaatttctgcccatggccacttgggaaatgtatatgtgtctttcgttgtgtttttcagggaccattgacatttagagatgtgaccatagaattctctctggaggagtggcaatgcctggacacggttcagcagaatttatatagggatgtgatgttagagaactacagaaacctggtcttcctgggtgaggataattttaattaagcaattcctattatattctataggtttaatttctcttttctgtagaatgtgttttggtgatttatgcttactataaatgagtttcacatccctgttttctggaaacagggatttataagtgtagaaaggaattttttttttttttttttttgagaaggagtttcactcttgttgcctaggctggagtgcagtggtgcaatctcagctcactgcaacctccacctcccaggttcatgcaattctcctgcctcagcctcccaagtagctgggactataggcatgcgacaccacacccggctaatttttttgtatttgtagtagagatggggtttcaccatgttggccaggatggtcttgatctgttggccttgtgatccacccgccttggcctcccaaagtgctgggattacaggcgtgagccaccgtgccaggccaaaaggaattttttaaagatgtttcatttttacctgaacttttcacatttctgagcagatctgtatttttcactctagattagtggaaattgctgaaattgagtggcataaaatacagttgccacaccttaaaatctcattgccaccaacaatttttgattcagtagtaccaggtagtaaaattaagggcctgtacaaattgaaaatactttctaaatatttagaaatgtatgttataaattagtattgggggatcaatttactagaatattctattacattctctttaatgagcatattatttgggtaatatgaccaatatttatgttatttatttttaataaaacaggtatggctgtctttaagccagacttgataacttgtctgaagcaagggaaagagccttggaatatgaagagacatgagatggtaactaaacccccaggtatgtgagagtgaatacaacagacaacacagataagaggtccagaggtcaaggagaaagccagttctcaaaatgtgacctgagaagctgtgctccaaaggaagtagtttctgggaagactgagattttttaaattttgctctcacgtagaggcatcttctgtcttatgctttaaaattctctaaggattctgttttcattttggtgatctcccttcaagtttacaatgagagccaaagtcgtgttcatggcgtataagggactgcacagtctgactgcttttccattgttattggggacacacaaatatctgtatagttttgagaaactatgttaaaagaacctggctcttttacctcacacttgctctgtcttttaccgtgtgatatgtccagttccttttcgccttccactgtgatcataagcttcctgacctgagacactcaccagaaacagatacaggcacacacttcttgtacagtctgctgaactgtgagccaaataaaccttttttctttataaattatctactctcagatatttttctgtatgcaaaatattatagtctataatgttacctacattttgttttcttaatcttttacatgaattttctattttttattattattgaaaatggggtctcagtgtctgcaacagttatgttgctatatatttcttgcttcacctttgtcaatatttatgtattttggagccctgttgttatacctacctgtacatataaatataataattatagattcctggtaaattgacccatattactattatataatatcaatttttgtctcatactagtacttgacttaaagcatattgtgtccaatataattatgactgtctcacccaattgtggctactatttgcatgaaatataaagtttttaaattctgttacttacagactatttgactctgctaaaattggtctcttgtaggaacatattgcatgcttttttccttaagccactcagtcatcttctttctttttcttttaattaattaattaattaatgaaatagggtctcactctgtcagccaggctggtttgcaatggtgtgatcatggcagtgagctgcagcctcagcctctcaaactcagataatcctctagtttcaacctcttaagtagctggattacaggcacatggcattaaacctagctagtttttttgttttgttttgttttgttttttagagacagggttttgccttgttgctcaggctggtctcacactcctggagtcaggtagtcagcccaccttggcctcccaaagtcctggaattacatttctttttattaagtagtttaaaaaatttatatttaaaatgatttcttaaagaaataaagttttgcactgggcacagtgacttatgcctgtaattccagcactttgggagaccaaagcgggcagatcacgaggtcaggagttcaagactagcctggccaacatagagaaaccccgtctctactgaaaatacaaaaattagccaggcatggtggcacacatcagtagccccagctactcaggaggctgaggcaggagaatcagttgaacccggaggtgcaggttgtggtgagctgagatcatgccactgtgcaccagcctgggcaacagagtgagactccatctcaaaaaaaaaaaaagaaaagaaaagaaataaagttacataccagtttcattgttctgttttatgtttttttttttaacatgttttttctcatttcttgtttaactattttttgtttaattttgtagtggcacgctttgcttattttattttgttttgcatagtttctataaaatttttgtagttatcttgaaaaacggacattatgtaaaatatcttaagattaaatcagtatgttttaatctcataacaatttcaatggaacaaaaaactatatttttatattttccagtttgttattaatattataaattatttcatattgtgtattcagatttatgcagatttacattttgtttttatattctatagaagaattttaagggtttctgcactattattatagtaagaaattttatatatgtctgtatatttacatttaatagaaagctttttttatgttatctagaatcattttattttcaacatgaaagactcattttagcatttctttttttatatgtgtctgtatatttacatttaatagaaagctatatatttatatatggatttttgatactgtctagcatcattttattttcaatataaaagactcattttagcatttcttttttctatatgtgtctgtataattatatttaatagaaagctatatatttatatatgggtttttgatgctgtctagcattttatttttcaacataaaagactaattttagcatttctcttgttatatatgcagagtctcactatgtttttgtgctgatcttgaactcctggtctgaagttatctgactgccttggcctcctaaaggtgtaggattacaagcatgagccactgtgcgtgtccacaatgtagcattttttttttttttttttttttttttagctgtgctagtggtgatgaacacccttacctttcattttggaaagtctttattttttactgtttttaaagtaaaataatttctgatcaagtgttatggattaagaatatttttttttcagccggacgcggtggcttatgcctgtaatcccagcacttcgggaggccaaggtgggtggatcacctggggtatggagtttgagactagcctgaccaacatggagaaaccttgtctctactaaaaatacaaaagtagccgggcatggtggtgcatgcctgtagtcccaggtactcgggaggctgaagcaggagaatcgcttgaacctgggaggtggaggttgtggtgagccgagatcccaccattgcactccagcctgggcaacaagagcaaaactccatcaaaaaaaaaaaaaagcatatttttttcttttattacatcaaaatttggaaagctctgtgttttttttttttttttttttttttgtctttaagtaacctgtatactactttatttttatttatttattttttcttaagttattggggtacaagtggtgtttggttacatgagtaagttctttagttctttaatggtgatttgtgggagttttatgcactcatcacccgagctgtatacactgcaccctatttgtagtcttttatccctcgtttccctcccgctcttcccctcaagtccccaaagtccactgtatcattcttatgcctttgcatcctcatagcttagctcctacatatcagtgagaacataagatgtttggttttccatttctgagttacttcacttagaatgatagtctccaatctcatccatgttgctgtgaatgccattaatttattccattttatggctgagtagtgttccatcatatatataatctcacagtttctttatccactcattggttaataggcaatgggcatttgggttggttccatgattttgctattgtgaatcatgctgctataaacatgtgtgcaagtatctttttcatgtaatgacttcttttcttctgggtagatacccagtagtgggactgctgggtcaaatggtagtatgacttttagttctttaggaatctccacactgttctccatagaggttgtgctagtttacatttccatcagcagtgtagaagtgttccctgatcaccacatacacaccaacatctactgtttttttgattttttttttattatggccatttttgcaggagtaaggtggtatcgtattgtggttttgatttgcatttccctgattattagtgatgttgagcattttttcatgttttttggccatttgtatatcttctgttgaaaattgtctattcatgtccttagctcagttttgatgggattgttttttttcttgctgatttgtttgagtgcattgtagattccagatattagttctttgtcaggtgtatagattgtgaagattttctcctactctgtgggttgtctgttcactctgctgtttcttttgccttgcaaaagctctttagtttcattaagttcccgttttgacactattccacaagatacagagagaaccctccctaatttatctttgtttttattgcatttgcttttgggttcttgtatatgaaatccttggctaagccaatgtctgaaagggtttttccaatgttatcatctagaatttttatagtttcaggtcttagatttaagtccttaatccatcttgagttgatttttgtataaagtaaaagatgaggatccagttttattctatgtgtggctagccaattatcccagcaccatttgttgaaaagagtatccctggccgggtgcggtggctcatgcctgtaatcccagccctttgggaggctgacataggtggatcacgaggtcaggagttcgagaccaggctgaccaaggtggtgaaaccccatctctactaaaaatacaaaaattagccaggtgcagtggtgggtgcctgtaatcccagctactcgggaggctgaggcaggagaattgcttgaatccaggaggcagaggttgtggtgagctgagatcgtaccactgcactctagcctgatcaacagagcaaaactccatctcagaaaaaaaagaaaagagtatcctttacccactttatgtttttgtttgctttgtcaaagttcagttggctgtaagtatttgggtttatttctgggttctctattcttttccattggtttatgtgcctatttttgtaccagtaccatgctgttttcatgactggctttatagtatagtttgaagtcaggtaatgtaatggcttcagatttgttctttttgctttgtcttgctttggctatgcaggctttttttttttgttccacatgaattttagaatcattttttctaattctgtgaagaatgatgatgctgttttgatgggaactgcattgagtttgtagattgcttttggcagtatagtcattttcacaatattgattctactcatcgatgagcatgggctgtgtttccatttgtttgtgtcatctgtggtttcttttagcagtgtttcatagttttccttgtagagatcttttacctccttggttaggcatattcctaagtttttggggtttttttttttcacggctattgtaaaaggggttgagttattgatttgactctctgcttggtcgctgttggtgtatagaagagctactgatttgtatacattaattttgtatctgaaagctttgctgaattattttatcatttctaggagctttcttgaaaagtctagggttttcaaagtgaacaatcatatcatcagcaaacagtgacagttttacttcctctttaccaatttcgatgccctatcttttttctgcttgctctggctaagacttctagtactgtgttgaagaagcatggcgagagtgggcatccttgtcttgttgcagttctcagagggaatgctttcaacttctcattcagtattatgttggctctgggtttgtcatagatggcttttattacattgatgtatgtcccttgtatgccaattttgctaagagttttaatcataaagggatgttggattttgttgaatactttttctgcatctattgagatgatcatatgatttttgtttttattcctttctatgtggtgtatcacatttattgacttgcatttgttaaaccatccctgcatcactggtatgaaacctatttgatcatggattctctttttgatatgttactggattcagttagctactattttaaggattttagcatctattttcatcagggacatcagtctgtggttttcttttttggttaatgcccttttctaattttggtattagggtgatgctggcttcatagaataaattaggaagggctccctctttctctgtcttgtggaatagtgtcaatagcattgctaccaattctttgaatgtctggtagaattctgctaaattctgtctggtcctagactttttttgtggatgattttaaaattaccatttcagtctcgctgcttgttattggtctgttcagggtatctaattcttcctgatttaagctgggtgggttgcatttttccagaaatttacccatttcttttaggttttctagttagtgcacttaaaggtgttcatagtagccttcaatgatcttttgtatttctgtggtgtcagatgtaatatctcctgtttcctttcttattgaggttatttggattttctttttttcttggttaatcttgcttatggtctgtcaattgtatttatctttttaaagagccaggtttttgtttcatttatcttttggtttttgtctgttggtttgtttcaatttcatttcattctgctctgattttgattattttttttcttctcctgggtttgcgtttggttttttcttgtttctctagttctttgaggtgtgaatttagagtgtctgtgttctttcagactttttgatgtaggtgtttggggctatgaactttcctcttagcaccgcctttgctgtatcctagaggttttaataagttgtgtcacttttgttgttgagtttgaagaatttttttaatttccattttgatttcatatttgaccccatgattattcaggagcaggttttttaatttacatgtatttgcatggttttgaaggttccttttggagttgaattccacttttattccactgtggtctgagagagtgcttgatataatttcagttctcttaaatttattgaggttcattttggggcctatcatatggtctatttggagaaagtttcatgtgctgttgaatagaatgtgtattctgcagttgttggatggaatgttctgtatatatttgttaagtccatttgctccaaggtatagtttaaatccattgtttatttgttgactttctgtcttgatgacctgtctagtgctgtcagtagagtattgaagtcctcactattattgtgttggtgtctatctcatttattaggtctactagtaattgttttataaatttgggagctccagtgttaggtgcatgtatgtttaggactgtgatatgttcctgttgtacaagaccttttaccattgtataatgtccctctttgttttttttaattgctgttgctttaaagtatattttgtcatatgtaagaatagcccttataaacctcttgtttagcatgatattgtggggttctctggcttaggtgaatagcaagccattttcatgaattacctcatgccattaggggaagaggtatcctcatttttttcaattttttatagtgatctgtgttcctgtttctctcattcagtgttatttaatttatttgaaattttaaaaattaatttattaatcttcattgttttatggttgctttctaaaaattttatactttttttgattgggccatgttgtcctaatattctatatacattgtaatcgttgattaaaatttgtacatcaaaaaagctacctgttggaatcttcataatgtagccttgtcctggaatagtctgaaaccaattgtcttggctagagattctgggagtctgtcaaacatgttcttagaatgtgtcttgtctgaaattgtgtgtgtgtgtgtgtgtgtgtgtgtgtgtgtgtgtttagataaagaacgttattcaggtttcttctcaatagtaatcacttgctacatctattttttgtgtgtgtggtactatattcagtgctgctgtaacatctaactttggtctcagcagactcaagctgtcattttaaagtatgccaccatttctttcagcactttatgtcatcagagacaaaaaccagaaaggcccctggaagccagaaataaatatatatgtgctactggtttttttgtttgtttgtttttttgagacagagtttcactctttttgcccaggctggagtgcgatggcatgatctcggctcacctcaacctccgcctcccaggttcaagcaattctcctgcctcaacctccctagtagctgggatttcaggcgtgtgccaccacgcccagctaattttctatttttagtagagatggggtttctccatgttggtcacgctggtctcgaactcccgacctcaggtgatccgcccacctcggcctcccaaagtgctgggattacaggcatgagccactgcgcctggccatgccactgttttatttgtctttaaacaataaaccaggagttggcaatttccttttttttttgagacagggtctcactctgtcacatgggctggagtgcactagcataatctcatctcactgcaatctctactccccaagttcaagtgattgcctcagcctcccaagtagttgggactacagacgtgtgccaccacatctggctaatttttgaatttttagtagagatgaagtttttccattttgaccaggctggtcttgaactcttgatctcaggtaatccacttgccttggcctccaaaagtgctgggattacaggcatgaactgctattcccagtcagcaatttacttctaaagagcctatgctatttttggtagcaggaagagctgcattgggaaactgtaaccgacttccctttccttctgtgtggctctttgcattgtgcttacttggggtacttaacttacatataaattttccacaaatgtatttggtcagtatgtttttgttacatttatatgtctatgaagaaattagggcctgtcttattttgctgtgccatcttatgtggtttgcataattttataggttagatttgtaaagtatattcatctgagtctagcaagtggaataatttgttatttttatttcttctagttatgcgttctcattttacacaagacctttggccagatcagagcacaaaagattctttccaagaagtaatactgagaacatatgcaagatgtggacataagaatttacgattaagaaaagattgtaaaagtgccaatgagggtaagatgcacaaagaaggttataataaacttaaccaatgcaggacagctacccagagaaaaatatttcagtgtaacaaacatatgaaagtctttcataaatattcaaatagaaataaggttagacacactaaaaagaaaactttcaaatgtataaaatgtagcaaatcatttttcatgctttcatgcttaattcgacataagagaattcatattagacagaatatctacaaatgtgaagaacgtggcaaagcctttaaatcgttctcaacccttactaaacataagataattcatactgaagacaaaccttacaaatataagaaatgtggcaatgcctttaaattttcttcaacgttcactaaacataagagaattcatactggagagacacctttcagatgtgaagaatgtggcaaagcttttaaccagtcctcaaatcttactgaccataagagaattcatactggagagaaaacctacaaatgtgaagaatgtggcaaagcttttaaggggtcctcaaattttaatgcacataaggtaattcatactgcagagaaaccctacaaatgtgaagattgtggcaaaacttttaaccatttctcagcccttagaaaacataagataattcatactggaaagaaaccctacaagcgtgaagaatgtggcaaagcttttagccagtcctcaacccttagaaaacatgagataattcatactggagagaaaccctacaaatgtgaagaatgtggtaaagcttttaagtggtcttcaaaacttactgtacataaggtagttcatactggagagaaaccctacaaatgtgaagaatgtggcaaagcttttagccagttctcaacccttaaaaaacataagataattcatactggaaagaaaccctacaaatgtgaagaatgtggcaaagcttttaacagttcctcaacccttatgaaacataagataattcatactggggagaaaccatacaaatgtgaagaatgtggcaaagcttttaggcaatcctcacaccttactagacataaagcaattcatactggagagaaaccctacaaatgtgaagaatgtggcaaagcttttaaccatttctcagaccttagaagacataagataattcatactggaaagaaaccctacaaatgtgaagaatgtgggaaagcttttagccagtcctcaacccttagaaaccatcagataattcatactggagagaaaccctacaaatgtgaagaatgtggtaaagcttttaagtggtcatcaaaacttactgtacataaggtaattcatactggagagaaaccctgcaaatgtgaagaatgtggcaaagcttttaagcatttctcagccctcagaaaacataaggtaattcatactagggagaaattgtacaaatgtgaagaatgtggcaaagcttttaacaattcctcaatccttgctaaacataagataattcatactgggaagaaaccgtacaaatgtgaagaatgtggcaaagcttttaggcaatcctcacaccttactagacataaagcaattcatactggagagaaaccttacaaatgtgaagaatgtggcaaagcttttagccatttctcagcccttagaagacataagataattcatactggaaagaaaccgtacaaatgtgaagaatgtggcaaagcttttagccatttctcagcccttagaagacataagataattcatactggagagaaaccctacaaatgtgaagaatgtggtaaagcttttaagtggtcatcaaaacttactgtacataaggtaattcatactgcagagaaaccctgcaaatgtgaagaatgtggcaaatcttttaagcatttctcagcccttagaaaacataaggtaattcatactagggagaaattgtacaaatgtgaagaatgtgtcaaagcttttaacagtttctcagcccttatgaaacataaggtaattcatactggagagaaaccctacaagtgtgaagaatgtggtaaagcttttaagtggtcctcaaagcttactgtacataaggtaattcatactggagagaaaccctgcaaatgtgaagaatgtggcaaagcttttaagcatttctcagcccttagaaaacataaggtaattcatactggaaagaaaccctacaaatgtgaagaatgtggcaaagcttttagccaatcctcatcccttagaaaacatgagataattcatagtggagagaaaccatacaaatgtgaagaatgtggtaaagcttttaagtggttgtcaaaacttactgtacataaggtaattcatactgcagagaaaccctgtaaatgtgaagaatgtggcaaagcttttaagcatttctcagcccttagaaaacataagataattcatactggaaagaaaccctacaaatgtgaagaatgtggcaaagcttttaatgattcctcaacccttatgaagcataagataattcatactgggaagaaaccatacaaatgtgcagaatgtggcaaagcttttaagcaatcctcacatcttactagacataaagcaattcatactggggagaaaccctacaaatgcgaagaatgtggcaaagattttaacaattcctcaacccttaagaaacataagctaattcatactagggagaaattgtacaaatgtgaagaatgtgtcaaagcttttaacaatttctcagcccttatgaaacataagataattcatactggggagaaaccctacaaatgtgaagaatgtggtaaagcttttaagtggtcctcaaaacttactgaacataaggtaattcatactggagagaaaccctgcaaatgtgaagaatgtgacaaagcttttaagcatttctcagcccttagaaaacataaggtaattcatactggaaagaaaccctaccaatgtgacgaatgtggcaaagcttttaacaattcctcaacccttacgaaacataagataattcatactggggagaaaccctacaaatgtgaagaatgtggcaaagcctttagtcagtcctcaatccttactaaacataagataattcattctgtagagaaaccctacaaatgtgaagaatgtggcaaagcctttaaccagtcctcacaccttactagacacaaaacaattcatactggagagaaaccctacaaatgtgaagaatgtggcaaagcttttattcagtgctcataccttattagacataaaacaattcataccagagagaaacctacaaatgtgaagaaagtaccaaagcttttaagcaatcctcacaccttactagacaaaacaattcatactggagagaaaccctacaaatgtgaagaatgtgccaaagctttttaaccatccttcaacccttactaaacatatgataattcacactggggagaaaccttagaaatgtgaataatgtggcagagctttcaaccattttataaaccttaatacacataggataatttatactagagacagaccctgcatatgtgaagaatgtggcaaagcttttaaccagtcctcaagccttactagacataattcatactggagagaaaccctacaaatgtaaagaatgtggcaaaactttttttttttatactttaagttctagggtacatgtgcacaatgtgcaggtttgttacataggtatacatgtggcatgttggtttgctgcacccatcaactcgtcatttacattaggtatttctcctaatgccatccctcccgcagccccccaccccctgacaggcctgggtgtgtgatgttccccaccctgtgtccaagcgttctcattgttcaattcgcacctatgagtgagaacatgtggtgtttggttttctgtttttatgatagtttgctgagaatgatggtttccagcttcatccatgtccttccaaaggacacgaacttatccttttttatggctgcatagtattccatggcgtatatgtggaatgtggcaaaacttttaaccaatcctcaaaccttactagacagaaaacaattcatactggagataaacccatcaaatgtgaagaatgtggcaaagcctttgaccagtcctcacagcttaaatacgcataagataattgatactgaaggaaaactctacaaatatcataaatgtggcatagcttctaaccattgctcagcttttactcaaaatgagagaattcctaaagaagataaactccacaaatgtgaataatatggcaaagcttttgaccggtcctcaaatcttactgaacataagataattcatgctagagacaaacactacaaatgtgaagaatgggcaaagcttttaaccagttctcaaaccttactcaaaataatttatagtggagaggaacgctacaaattcaaaggatttggcaaaacttttaagtgtttctcaaaacttactgaacacaagataattcatattagagagatactttacaaatgtgaagaatgtggcaaagcttctaacgggttctcaaatcttactgaatgtgagataatttatattagagagaaaccctacaaatgtgaagaatgtggcaaagcttctaacgggttctcaaatcttactgaatgtgagataatttatattagagagaaaccctacaaatgtgaagaatgtggcaaagcttttaactggtccttaaaccttactgaacataagataattaatactaaaggaaaccctaaacatataaaaaatgtgacaaagcttttaactggttttgagaccttactcaaaataagatagtttatactgaagacaaactctataaatgtgaagaatgtgacaatgcttttaatcaattctcagactttactagacgtaagaaaattcgtactggagaaaaaccctacaaatgtgaagaaagtgggaacacttttagccagtcctcaactcttactaaacaagataattcaatgggagagaaaccctacaaatgtgaataatgttataaccattctatttatgtgtttacatgtttagtgttgaaataatgtttatttttcatattgatattacaatttggagacatttttcactcacaatttttgaagtgggtgaatttcagtctacagtttttatttttagtcacttcactgtaggcaactctggtaattttctctggaaaaattttggagacgaagttgtaatggctttcaggttaaaacatttcctgttattttgcatgcaaacttgtttacggtgttcaaacagtggccaatctttaggtcataaacaacacctacccttttaatgtctttcataccattgcaattagcaccaaaaacttctgctgtcttaaacttaaaataaaagccctaatgtacgttggctcctcccatgcacggtactgagttcagaacatgctgttaaatgtcagagttcctatggttatgactgaaaaattaaatgacaagacagcacaaaactatatacttttgataccatttagccaagttaatgacaaagacagagaatatttgaaaaaattgatatccttctataatgttttaaatatatatttttcaacttgacagataaagcatgtattctgtaaaacatgatgttttgaagtatatatatacattgtcaaacttaattttaggtaattaatgctgtacctcacatagttaacatttttgtggtgagagcacatgacattgtcctagcattattcaaaaatacattattattaactatagacaccatgctgtacaacaagtcttttgaatatattacttttatctaactataattatgtattattctttgacaaacatctttctaaagccctcttttagataccttggcatctggtggttacaattttattctgtgcttcagtgaatttaagttttatatcattcatgtttaggtgaaatcataaaattttctttctgttcctggcttattaaaagataaatagataaattttatatatatactactttgtcagtatttaatcattagatgttgaactgttgattctatattttggctattatgaagagtgttgcagacaacatagaaatacaaatatttctcattctgatttcatttgtttttaaatatatatatatcctatagtgaaattgctgcattatatggcagttttattttaaatttattgagaaatctctatttcggttttcataatggctgttctcatttacactcagactagcagtgtgcaagcattccttttacttcacatctttaccaacacttttttttctttttaataagagtcattctaatatgagtgactttttatctcatagattttttggcttgcctttctctgataataagtgtaattgagcattttaaaatatctcttggccatatgtatgtctttttaaaatatttaagccttttgctcatttttcatagttatttgtttttttattgtatagtcactttcttacatgatcttgatattcaccccttgtcacaagtatggtttgcaaaaatgttctcccatttgtcttgttgattatatcagattctgtacagcaactttttaatatgaagtaatctgactcatctatttttcctttagttccctgggattttgaggttaaattaaaaaaaattactgttgaaaccaatgttacggggctttcagtctatattttttgtagtagtttcagagtttcaggccttacatttaagtattaatatattttcagttgatttatatatgtggagtaagatgagagactcattgctctgcatgtggctatagttttctcaacactatttattgaagatactgtcattttcctaagaaattgtcacctatataaaaaatcagttagctttaaatacatggatatatttcctgtctcttgtgctccattggcctgtgtgactcattttgttcaagtaccatactgttttcattactatagctttgcagtatatttcaaagtcaggtaggatgatacctttagcctttcttttttgcttgaatgcttctgctattcagggtcttttgtcatatcatataaattttagggtttttgtttgtttttgttttattttagacagagtttcactcttgtcacccaggctggagtgcgatcgtgcaatctcagctcactgcaacctctgccctcaggtttaagtgattctcctgcctcagccttctgagtagctgggattacaggcacacaccaccatgctgggctaatttttttttgttgttgttgttgttttaaaaatgtgtgggtttttttatagtatttattgatcattcttgggtgtttctcggagagggggatttggcagggtcataggacaatagtggagggaaggtcagcagataaacatgtgaacaagggtctctggttttcctaggcagaggaccctgtggccttctgcagtgtttgtgtccctgggtagttgagattagggagtggtgatgactcttaaggagcatgctgccttcaagcatctgtttaacaaagcacatcttgcaccgcccttaatccatttaaccctgagtggacacagcacatgtttcagagagcacggggttgggggtaagcttatagattaacagcatcccaaggcagaagaacttttcccagtacaaaacaaaatggagtctcccatgtctacctctttccacacagacacagcaacaatccgatctctctctcttttccccacatttcccccttttctattcgacaaaaccaccatcatcatcatggcccattctcaatgagctgttgggtacacctcccagacggggtggcggccgggcagaggggctcctcacttcccagacggggtggccgccgggcggaggggctcctggcttctcagacggggcggccggtgggcggaggggctcctcgcttctcagacggggcggctgggcagagacgctcctcagttcccagacggggtcgtggctgggtagaggcactcctcacatcccagacggggcggcggggcagaggtgctccccatatctcagacgatgggcagccgggcagagatgctcctcacttcctaggcgggatggcggccgggaagaggcattcctcacttcccagactgggcggccaggcagaggggctcctcacatcccagacgatgggcggccaggcagagacgctcctcacttcccagacggggtggcagccaagcagaggctgcaatctcggcactttgggaggccaaggcaggtggctgggaggtggaggttgtagcgagctgagatcacgccactgcactccaacctgggcaacattgagcactgagtgaacaagactccgtctgcaatcctggcacctcgggaggccgaggctggcagatcactcacggttaggagctggagaccagcccggccaacacggcgaaaccctatctccaccaaaaaaatatgaaaaccagtcaggcgtggcggcgcgcgcctgcagtcccaggcactcggcaggctgaggcaggagaatcaggcagggtggttgcagtgagccgagatggcggcagtacagtccagcctcggcttggcatcagagggagaccgtggaaaggggagacgagggagagggagaacgtagaaaggaaaagggagagggagagggagagagctaatttttgtatttttagttgagatggggtttcactgtgttggccaggctggtcttgaccccgcctctgcctcccaaagtgctgggattataggtgtgagccactgttcccaggcttgagcacacttttattagtttttctctgtttagtccttttgtttgtttctattttaataagaattttaatttctacctgaaattactaatttgagcccaaagtatctgagatgtcagagtgtcaggaggttgtgacaatgcgtgcccaaggttgttggggcacatgttggttttatacattttagggagacaggagacatccatcactatatgtaagatgcacattgttcagaaaaggacaacgcgaagtggggcgggagcttccaggtcataggtagataaagggcaaatggttgcaatttcctctgagcttctgattagccttttactgggttttttccaggtctgtctttcctaagcctccaagtttatctggagtcaagagaaacttgactccatgtttgtagaattttaatctattttggccaattttatgtctactttataacatataacaacaggtaatttaaccaaaacccttatggttttcttgcacagctataagctacacatgtattcttagcaaggtaaaaacaacagaaaccatgatgattacaataaccacccttctgtgcatgagtagcccttcagctgggacatcacaccccactgtagagtttctgaatcctacacctgaaggcagtcaaaagttggaaaattgtcttgcacacatagatctggtccacaggtaggttggtgactcccacaccatgattcagcacacccacgaaatggtgaatttactaagaagacaaagtttacaggaagaatagaggctctgatgcagtccactgttgagattgtgactcatgtacttagactcaacattcaggaggtgttgactcttatacctaaaactgggacatgtatggaattgttaatctcaccgtggatcttctgtagatgttattgtgacatatgcctctcccatgacatatgcctctcccagcacctgagtgatttgactctcttgggtcccagctgacagatgggattgtggcatatcactggacacagcacctaggtgatgtgacactattctcctgccttggcactacctacctggggctttgtgacacgtctgtgctcataactaaggggatgtgattctcttctcttgcctgatgtctgctcacgtgggagacaatgacatatcgctgggcccaatgccaaagtgacattgcttttttaccttgaccctcttctcagaaaacatcgtgacgcattgttggggcacagtcaacgtgacgtgagtctcctgcatgaaccctgaccacagagaccatcgtgacataatctctggaagctcaactattggaaatgattaccttgttatacctgctctttgcccataggagagaatgtgacatatctctgggcccaggacttagttgatgtaactctgctctcctgcctgggctatgcctacagaagaaagagtgacttatcactgggcccagcacacaggtgatgtgattctactgccttgatccttgtccataggaatcatcattacatacttgtgggctcttctgctggatgatgtgtgtctccttttctgtccacagaggagattgtgacatatcacttgacccagcacctacatgatgtgcctctcatgccttggcttttcccactgggctaattgtgacatatagctgggcacagcttctaggtaatttaactcttctcttcctgagtcctacccacagggggcattgtgatgtgtctctaagcacttcacctaggtaatatgactcttttccttgaccctcccctaatacggtattgtgacatatttctggaccaccacctaggtgatgtcactcttttctcctaccttttactggaagtgaattcatacgggtatgagtgcaggaacctcgattcttgccttagaagaaacaactcgactgaggggcataaagcaggagagaccgaagcaagttttaaagcagcagtaaaagttcattagaaagctacagaacagaaacaaaaggaaggaaagtacacttggaagagggccaagtgggtgacttaaaaggcaagtgcacggtgtgactttttgacttgggattttgtatgttgacatacttccggggtcttgcattacttccccctacttgcccaactcttgagatcttattgggaagctgctgatcactagttgtaggtgatccactagttgcccacttgagaacagaggagatactggagtgaactgtggccccctcttcatccttggggttcaagtcttaccatgcacacctagcttttgatctctgttttatgggtctcttgcacctgtggccttggcctggcctacatcattgactccattgacctctagtgactctagttaagagcattctagcaacaaaataagtatttctcttctcagatttccacttcccatgttcttttagtatatgtgaagcccatttttcagctaactgcccaaagggggctagacttccctccccactctttttatatatgaccttgaaggtcttgatgcatattgagaagggcaggaaagtaattagaaaaatggaggctacagaagaaagtgaacggaagtgagaggaatactcaagggaagacttcatatgcttaacaaaacagcagcccttggattcaagaggataataatgttcatccaaagcaggtggacaaactgcttcaaaagtcactgagaaactcattcctggggcataacagaaatgagaagtatatgataagtcataagctgtcagagccagagttggaattagtgtggattagtggaattagattagaggcttatgtctggaccctatctacaaggaaattgtgacatatctgcgttcatcagcaaaaagtagtgactctacttttttctactgggaagattgtaacctattactgggcgcagaaaacaggtgacatgcttctcctgcctgggccttggccacaaaaagttttgggatataacatggctcagcacccaggtgatgcaactctgccacctgtgccctgctttcaggtggggattgtaacatattcctggctaagcatcaaggtgatgtgactctcctgcctggtctttgccctccgaaaatattgtgacatattcctgggccagtgccaaggtgacgtaactctcttactcattccctacacacaggagggatgttgatatatatatttgctgagatcactgatatgatgatgacatttatacaaaaaaaaagttataccactccctcacatacagtataaagccgtcaagtggtacaaactcatcacaggacacagcacaaatatgagattgttttttgtgtgtgcaacctgccaacctttaaagtcacccacacacatggacagggtccaattttgaagtcctgaaactcacaagtagacacagttcaaagttaaaattgtgactgtcatatgtgaacacctggccactgttgggttagtgactgtttaataaacccagcttataggcaggtaaaatctttccaatctggactctcctaattgaagagatgttgactcatacctgggcttagggccacgggtacaatcacaggtccatatcagtacaaatgtgtcagagtagattgtgactttcatacataatgtataaagccctcgggtggtacagagagtgtcctaacaggaccgagaacacggatgagaatatgacactcatgcatactcacccaacagtcaagattgtcatctttccacatgaacacagcccacagctgaggaactgaatctcacaactggaggcaaagggtggacttttcacatgtggaaccagtcaaaaggagggctggtgactttcagaccatgactcagcatacctgtaaggctgtgactaaggagacacagtccacaaaagtgattgaggctctcatgcacgattccagtccaccattgagattgtgactcctgtatttagacataacatacaagaggtgttgactcttgtacctggaaccaacacacgtgccaaattcttttcttttttctttctttttttttttttgagacagtcttgctgtgtcacccaggctggagtgcagtggcataatctctactcattgcaacctctgcctcccgggttcaagaaatcctcctgcctcagcctctcgagtagctgtgattataggcacacgccaccacaaccagctaattttttgtatttttagtagagatggggtttcgtcatgttggtcaggctggtctcgaactcccgacctcaggtgatccgcctgccttggcctcccaaagtgctgggattacaggcatgagccaccacgcccagcaactaaattgttaatctcattactagaccttcctgtaggtgacagtgtgacatatgcccctgcccaccacctgagtgattttgagttttctgcctgggctcagtcaaatgtaaaattgtgagatatctcttgactcagtatctaattgatgtgactattctgctttgtctgtaaccacaggtgacattgtgacatatttctgggccttgtacgcaggtgatgtgactctcctctcttgtcttggcgatgccccagagggcactgtgacacattactggatcctgcaccccggatatttggctctcctacctgtgccctgcccacatgggccattgagacctattgctgagtcccaagacccatgtgatgtaacttacctgctagagctctttctataaggggcatttgacctatctctgcctattatccaggtgacgtgactcttttctccaacctggtctcagtctacaggaaaaattgtgacatatctctgagactagctcctagctgatgtgacttttctctttttcctagcttctgcccactggggagattgtaacatgccccttgtcccagcactatgttgatatttactcttgccttcacgctgcaatcaaagatattgtgacatatttctgggcccagcgccaaagtgatgtgagtctcctgcctggatcctgcccataaggggtattttgacatatctttggacccatcaattcattgatgggaccttgtctcctatgagctttgccctggaccatctgcacaaaatagagaacgacttatcactgagcccagcacacagatagtgtgactctcctgccaattccctaccctcaaaaatgattgtgacatattcctggagaaggacccagatgatgtgattctcctgcctgctccttacccacaagtaagattgtgacatatatctttgctcagtttacaggtgtgaccatgacttttttacctcaaaccagccaatatgggtaatactatgggtcttccctttgttcgaaggtaatagagggttaccactttgttgcatatcatataaagatcttgggtggtacagagagtgtcaacacaaagcctggcacacaggtgaaattgtgttttacatacaccctgccaaccatttcattcatcacattcacacatagacaaagcccactggtgaagttttaaaacacacaggaatgcagcttacaattggaattaagactttcatatgtgaagatttggccacacttggaatggtaacttatttttaaatccactcataggtgggactctcctatctggactgagccaataggagtgatgttgactgtcatatctttgcttagggccacaggtacaatcattggtccataccagcatgaatgcctcagagtgaatggtgacactaacatacactgtataatgccatcagttggtacagaaaatgttttcacagggcccagcagacaggtgagattgtgaccctcatatgaacatccagctgaaagtaaagatggtcaaccacccagctgaaagtaaagatggtcaagtaaagatgtaagtcatacatacatcaacacagtgcaccattgaggttctaaatctaacaaccagaggcagtcagaagattttttttaaaaaaggctcttatacataaatgtggtccacaggtgggttggtgactctcagaccaggattcagcacaccaagaaaactgggactccattaagtcaacacaacatgcaataggaattgaggctatgacgcatagatctggttcactgatgagacgtgcctcatgtagttggacccaacattcaggatgtgttgactgtcatatctgaaactgggatatgtgcaggattgttaatctcatccctggaccttcctgcaggtgtgactgacaacatgtgcccagcacccagcataatttgaagtctcccacctgggcccagctcacagttgaaattgtgacatatcactgaactcagaacataggtgatgttattctactcttctgccgtggccctgcctacatggagcattgtcacatgtttctaggccccacactcagcactcaggttatatgtctattctgcctgtgcccagcccatgtggatcattgtgatatatttttggggctgacatttatgttttgtaagcctcctgcctggggtttgccagtagggagcattttgacatatctatgtgccaatcgtgcaggtgatatgaaccttttctactggctggtttctgctcacagggaagattatgacctatcagtaggccaacaggtaattggtgtaactcttagtctcaggttctgcctacaggggagattgtgacatattgctgggctcagcaacaagatgatttgggtcttctgcctggaccctgccttgtaggagcattgtgacataactctgagccaatcacctagttaatgtgaattttctcttctcttacctgaactgtgcccatagaatagattgtggcatatctctaggaccagcgtctaggtgatatgactctcctctcttacctgaccatgcccacagaaggaagttacttatgactgggcccagcacacaggtgacaggggtcatggagacctatctctgggcccatcacctggatgatgtgactcttcttttcttcatagggcccgtccatgtgaggaatgtgacatattgctgggcccagcatctatgtgatgcatcacttctcttgtgccttatctctttcaactggagtgattgtgacatgaagcccctaatttatgtgactcctcttttccatctgagccctacccacagggggcattgcaacgtatttttgagaccctcccctaggtggtgtgactctcatgagtgagccgtccactcagttggtattgtgacacatttttgcacacagcactgaggtgatgtgactctcttctactgcttgggctctgtccaaggaggtattgtgatataccactgggtccagcacctaggttatttgacttccctctactgcctgggccctgcatacattgtgtattgtgacatatggctgtgtccaaaacataggggatgcaactctcctgcattggctttgcccatagaagtattagaaaagactaataaaagagaataaaatatcttaattattcatctaggtgatttgactcttcttttgtgcctgagcactgcacacagctgagattgtgacagtgatatgcacacccagccaacagtatagactgtcatcatcccacctgaacacagcccactcttgaggttctgaatctcacacccaaagccagtcaaaaatagtgaattgactctatatgcagatttcattcacatttgggtttctgactctccaaccaacattcagcaaacctgtgaggctgtcactctactaagaagacagtccacaggacagattgatgctgtcatgcatggatccagtacaccattgagatcatgactcatgtacttatacccaacatgacatttcactgggcccagcaccaagctgatgtcactcctctattatccaggttctcactctcacctagttgacgtgactgtcttacctgtgctgtcttgtcaagggatatggtgacatattactggacccagcacctagttgatgtgacttttgctgctcctagggctcacagtcctaaaaaagaattgagttgtactgctgggcctagcaccaaggcgacaatactgttagctgtgtctgcatatcaaagtcataatctcacctgtgtgctggcccctgtaataaaactctgtactgccagggggcattatacaatatgaataagtttcataatctgccgtgactttcatacaggtaggagactcaggaccctaccagtttccttaagctcagctataagggtcaacatgtattttattggctgggtctagttataagagtcatcatggtgcctgtgagctaacatcacgcctgtggctggatctacatatgacagtcaaaattccagctgtaggctgtgtccatatacgagactcaggacctcactagaggtctctgttcatgtgtgagaatgacactcataactgttggctggatgagcatacaagagtcacagtctcatctgtgtactgggtgcacttatatgttaaaatcccacttgtggaaaagaaagaagctaagagagccacgtattttaagtgctgggctaaagatatgttaaaatatcccctgtgggcagggcccaggaaggagagttaaattacctgcatgctgtgaccagtgatatgtcacaatgccttctatgggcatggcccgggcaggaatttcacattacctttatgctgtcccaaagatatatttcaatccccctccattggcatggcttagagagaatagaagagtcacagcacctaaattatggccacagagataaatcacaatacctcctgtgggcagggcctaggatagaagcttacatcacctgtaatctgggcttgctaaaataattcatcctcctgttgccatgacccaggcagaagaggagaatcatatcatctaagtacttgggcctgtggtatgtcacagtccattttcaaggggcagaatgcaggcaaaagaaaaaagtcacatcacctaggcaacgagttcagaggtatgtcacaatacctaccgtgggcagggcccaggcagtacagtcacatcaccgaggtactgggctcagtgatatctcacaaatggctttctgggcagggcccaagctaatgataagagtcagatgacccagtgatatttcacaataccctctgtgggcagggctcaagcaagagaatcacatcacctaggtgcttgacccaggtatatgtcacaatctcccctgagggctgtgcccaggcaggaaagtaaaatcactcaggggttatgcagaagtatatgtcacaatcacacttgtgggaaggtccagggatgagattcacagttccacatatgttccagcttcaggtgggaaagtcaacacctcccatgagttgcatccaaatgcgtgagtcacaatctcaatgacggactagattcatgcatgagaccctcaattttaccggtaggctgtgtactggtatcagaggcaaagcctcacaggtataatgaatcctggtcctatagttaccgtctacctggagacaaaatctacatgtaaggattataattccaactttcaactgtgtccaggtgtgagattcagaagctcaagagttgtctgtattcatgtgggaggatgacaatttttactgtgggctggaagtgtatatgagaatcacaatctcagctgtgttctgggtcctcttatgacactctctgtaccaccagagggctgcacattgtttgggtgagactcacaatcccctgtgagacattagtgctgtataaatgcatgattttacttgttgccccactcccaggtatgagagtcaacatttctcatattggctgtgtccaggtataaaagtcattgctctgcctcttagttgggttcagatatgagtcaccatcccagtggtggctagaggtacacatgacattaaaaactccaactgtggattgcatctgtgagtaaaattcaggacctcaccagtgggttctgtccgtgtgtatgaatggcaattctctactgttggctgagtgtgcatctgagagtcacaatctcaactttgtgctgagttatgtaatggcactttctttacaaccctgggggcattatacaatataagtgagtgtgataatcctctgtgacatttatacaagcagaaaacccaaaaccttacctgttgccctaagcctaggtacaagagtcaaaatatcttctattggccaggttcattgtgcaagtgagttgggtacagaaatttgtcaccatccaacctgtggctggatccatatatgacagtcacaatttcaatggtggaatgggttcatgtgtaagatttaggacatcaccggtaggctcggtctatgtatgagcatggcaattcaaactgttgactaggtatgtataaaagagtcacaattacacctgtggactgggccctgcaatgacagtatttcccaagagctttatacaacatatgtgagtgtcataatcttctgttactttcctacaagtaaaggacccagaccccaaagcctagctaccagagtcaacatctctcttattagctgggtccaggtatgagtcatcaccattcctgtgagctgaatccagagtgagtcactatctcacttctggcaagatatacatatgacagtcccaattccaactgttggctgtgttcacatataagactcaggacctcaaaagtggtctttgttcctgtgttatagtgacaatagtaacttttggctgggtttgcatacaagagtaaaactctcatctgtgtgctgggccgagttatatgtcacagtcttaccttagggaaaggctgagaaataagagtaacgccaccttgattcttcacctggaatatgtctcaatcccctctatggaaaaggcccaggcagaagagtcacatcacttgtgttcagggcccagcagcatataatatttcctctaggcagagcccagacaagagattcatgacatttgggtcccgagcccagagatatgtcacaggggactaaagaatcttttctttaggcatgtttttggcagcggagagaagcacattatgtaaaaaattggttcaaagatatctcacaatgtccccttcgggtggtatgcaggtaggtgaagagagtcacatcatccagataatcagcccagcaatatgtcaaaatgccccctgatggaagggcaaataaaagaaagtcatggccgggcacagtggctcacacctgtaatcccagcactttgggaggccaggtgggcagatcacctgaggtcaggtgttcgagaccagcctgaccaacatggagaaaccctgtctctactaaaaatacaaaattagctgggtgtggtggtgcatgcctgtaatcccagctactctgaaggctgaggcaggagaatcacttgaaccagggaggtggaggttgcagtgagccgagattgtaacattgcactccagcctgggcaaaagagtgaaactccatctcaaaaataaataaataaataaataaataaaaattaaaaataaagtcacataaccgaggtgagtaaaccagagatttcacaatgcatgctataagtagggaccatggaaaagaggagcttcacataacctaggggctacacccagatatatgtcacaatcaccccagtgggcagggcctaggtataagaggagagtcacaccacacaaatcctaaaccaagtgatatgtcacaattcccactgtggatgggtccaagaaaaaagaaaaaagtcacatcatctacatgttggggccacagatatgtatcaatgttccctgtaggtatggcccaggcagaagaggtaagtcaagtcacccgggtgcagagctgagagatacgtcacaatgtcttctataggcaaagcccaggtacaaaggagagtcacatcaaatagtagatcagcccagagatatgtcacaatgcccctgtaagcagagtccaggcatgagactcaaatcacttttgtgctgggctcatcaatatgtcacaatgccttttgagagcaggaccaaatcaagagtaatatcaccttgtttgacctagtgatatgtcactatcttttgtttgcacaaaatataggaaaaagagacgagtcacatcagctgggtgctgaggccagagacatgtcaatctccccatcaacagaaatcacgtaggagaagagagtcaaaacacatgtatatgatgaggcgcggtcactcatgcctgtaatctgagcactttgggaggccaatgcaggtggatcaccagaggtcaggagtttgagaccagcctggccaacatgatgaaaccctgtctactaaaaatacaaaaattagtcaggcgtgatgataggcacctgtaatcccggctacctgggaggctgaggcatgagaattgcttgaacctgggaggtgcaggttgcagtgagccaaggtcatgccactgcactccagcctgggtaatagagtgagactctgtctcaaaacacacaccacacacacacagacatacagataaagggcacaaaaatatttaataatgtcccctataggaagggcccaggcagaagagtaaaatcacctgggtgttggactgtgcaatatgtcaaaatagccaatgtgggcaggcgatagccagaaatcacataaactgggtgcagggcctgtaaatatatcataatgtcttctatggagacagccaagacaggagaatagatcacatcagctaagtatggaaaaaaatgacatgtcataatctccactggagcatagactcaggcaagagggtcaaatcactcagattctgggcagagatacatcagaatcacacctacaggaaggtccagggacaggattaacagtcccacacatgtcccagttgttggtttggtctaagtatatgagtcacaatctcaaaaataaactggatctgtacaaaagagacttaactccttctgaagactgtttccccttagtgcagtcacagcctcacagatgtggggaatcttggtctgagattcaccaaccaacctagggacaagatccatgtatgagagttaattctccaactttccactgcctccaggtgggagattcagaacctcaacggtgggctgtgttcatgtggaaggatgacaatctttactattggccacctgtgcaaaagagtgtcataattttacctgtttgctgggctctgtgaggacagtctctctaccattcaggggctatatatgctatgtatgagagtcaacatctgctctgagaccttcatgctgttatgcacccatgattgtacctgtgccactaagtccacatatgagactcaacatctctcctattggctgagtctagatgggagagtcctgacctctctatgagctgggtttaggaatgagtcaccagcacagctgtggccaagtgttcacttatgacagtcagaattttaactgcagactgcgtctgcatgtgagattcagcatttcaccagtgggctctgtttagatgtgagggtgacaatcctaacagttggctgggtgagcatatgagaaacacaatctcgcttgtgttctgggccctgtgatgacatcttctctaccactggaggactttatataagatataagaaagtggtagttctctatgactttaatacacagaggagacccaggatcttacccatttcactaagtctagctatgaaagtatcttatattgactggttcgaggaaagagggtcagcaccctacctgtgagctgggccaagatatgtcataatcccacctataggtagagagtgagcaggagggttatatcaactgggagctggacaaggcatatatcacactcttccctgaggacaaagaccagctagaagagtcacatcccttcatgctaagtcagggatattttacaatgccttcctgaaagcagggaacacgatgcatactcacatcacctaggtgctgggcccagtgatatgtcacaatgctccctgtggacagtacccaggcaggaaagacacatcatctcaatggtgggcccagcaatatgtcccagtctttcctgtgggcagaatgccggcagaagaggagagtcacatatcctaggtgatggattcagggatatgtaaaaagttttctgttagcaagaccaaggcaggagccttaagtcccattgatgtagggcccagccatatgtctcaataccccaaatatgcaaggcccaggcaaataagacagtcacatcacctaggtgctcggtcaagggacatgccccaatcccctttttctgtcaggacccagacagaagaaaagagtcacaacacctaagtgatgaacaaaaagatgtcataatacccctgctggcagggcccaggtcgaagagttgcatcacttaggttttgatcccagccatatgtcacaacatagaatgtatgcagggccctggcagaagaggaggagagtcacaacacctaggttcttggccccgtgatacatcacaattccttcttgggcaaagtccaagcagtagaagagagtcacatcatcgtcatctagttgctgggtccagcaatatgtcacaataccccctaagaagagggcctaggcagaaaagtctcctcacctaggcaagaggcccagaggtatatcccaatgctttctgtgttagggctcaggaagaagaaagtcacaaagcctatgggatagaccaagttatattttacagtcaccctagtaagcatggttgaggcatgagtggagagtcacatgatgtaggtgctgagccaagtgatatgtcacaatgccctctgtgagcagtgaccaggcaggaggaagaagtcaaatcacctaggtgataagtgcagagagatgtaacaatattccaggcaagagagtaacatcaccttggtgttggattcagaaatatatcacaatgtcccacgtgagaaagatacaagcaagagagtcacaagaactgggtgcaagacctggcaatatatcataatttccactgtggacagactcaagaaacaaaaggagactcacatcatataggttatgggccccagagatatattccacttacctctattggcaaggaccaggcagaagtatcacaccacctttgcgctcagtaacgtactaggtcatatcacctaggtgataaacaacaatacatcgccgtttcttttctgaacatagctcaggcaagagaggggcattgcatttccaaggtgctgggcccagatgtatgtcaccatatcccttatgggcaaagatgtggtaaggggggatagtcaaatcaaatagttgatgggcccaaagatatgtcacaatgcactctatgggcagggtccaaacacaagacacacttcaccttggtgctggtaacagcaatatgtcacaaggccttctgaagacagtgccaaggcaaaagagtaacatcaccatggtgttgagcccagctttatgtcacaatctcccctgtgaggaaaacctcagaaggcaagagaagtcacatcagctcagtactgaacaaagtgatatgttccattctcccctgagagctaggatcaggcaaatgaagatactcacatcacttggtgacaggcccaggatatgaaacaattttctgtataggcagggcttaggcaggagagttaaatcaaatgggcataggacccagtggtatgttacaatgcctcccgtgggcagcgtcaaggcatgagagaagacatcacccgagtgcaaggcccagtggtgtcaaaatgtcccagcacccagttatatgttacaatgtcatatgtgagcggggtccaggcagtagagtcaaatcactcaggtgctggactgcggcatatgtaacaataacacctacaggaaggtccagagttgagattaacaatctcacacatgtcctggttctaggtatgagtcaatttctgtctggtcattctaagtacacaagtcacaatcccattggccaacaggatctatgtttgacagccctattccttctggggattgtgttttgtaagtagagtcacagcctcacgggtttgctgaatcttaatctgagtgtcatgaacccacttggggaacagattcatgtatgagagtcaaatttgcaacttttagcgacctcaggctgtgagattcagaacctcaacagtgagctgtgttcatgtgggacaatgacaatctttattctcacctgggtgtgcagatgagagttgcaatctcacttgtgtacggagccctgttagaacactctctgtaccactcgagggctttattcaacatgcatgagagtcaaaatttgctctgaaacctccatgttagaaaggatctttgatcatgcctgtggccctaagcccaggtgtgagagtcaacatctttcttattgactgtgtccggataggagagtcttcacctgcctataagttgggattaaaaatgagtaaccattccaattgtgccttgatgttcagatatgaaagttgcaatttaaactgtggactgactgcatttgtgtgtgagattcaaaacatcaccagtaggttctgtgaatgtgagagggtggaaattttaatggttggtggactgtgcacacgagaacacaatctcactcatgttctgggatttgtgatgacattgtagtacccgaatgctttatgtgatatgtgagactggcaactttctttctttctttttttttttttttgagacagagtctcactctgtcgcccaggcttgagtgcagtggtgcgatctcggctcagtgcaacctccgccccctgggttcaagcgattctcctgcctcagcctcccaagtagctgggattacaggcacctgccaccacacccagctaatttttgtatttttagtagagatggggtttcaccatcttggccagctggtcttgaactcctgacctcgtgatccacctgtctcagccacccaaagtgctgggattacaggtgtgagtcactgtgcccaggctgagagtggtaactttctataaccttcatacaaagaggagacacagggtcttactcatttttctaagccaaaatatgagagtcagtatctcttctgttggctggttcatctcacaaggtatgatggtcattattgcacctgtgagctgaaccaagatatatgtcacaatgccacctctcagtagggagcgagcaggagagccacatcacctaggcactaggccatggatatgtcacagtcttttctgaaaacagggaccaggctggagagtcacatcgttagcatgcttagccaaaaatatttaaaaatctcctgaaagcaatgcaacaggaacagaatcacctcacctggctgctgtgcccagcaattttgtcacaatgctctctctgggaaaatcccaggcaggagagacacatcaactggttgctgggtgcagaaatatgtcacagttttccttgttggcaaagttcaggcagagaaagattcacaattcttaggtcatggatgcagacgtatgtcacaaggctcactgcaggccaggcttaggcaggagcctcatgtacccgaggttctgggcctagtgatgtgtcatgatacccaaaatatgtggggcaaagcaaaaagaggagaattacatcatctagaatcagggtccagtgatatgtcacaattttttttttttggcagtgccctgatgaaagaagagtcacatcacctttgatctgggtccagtaatacatcacaatcccttcttggtcacagcccaagcagcagaagaaagtcaaatcacttaggtcctgggtttggaaatatgtccctatgaggagagggcccaggcaagagagtcaaatcactgaggtactgggcaaagaaatatgtcacgatcacacctgcagaaaagtccagggataaaattaacaatcatgcacatggcccagttctaggtataagagtcaacacattctgtatgttgggtctcagtacaagagttacaatctcaacagtggacaggatccttgcatgacagccacaatccctcccgtgcactgtattattttcaaagggtcacagcctcacaggtgtgctgaatcttggtcaggtgggttgctgactctccacataatgagaatcagttttccaactttcgactgcctcctggcatgagattcaggactttaacactggctgtgttcatgtggttggatgacagtctttatcattatctgggtgtgcatatgggtgtcacaatctcatttgtgtgcccggccctgtaaggaccctctctgtcttactgagggcattatgcagtatgcatgagagctgcaatctgttctgaaacttttgtgcttgtgtgaacccacaattttacctgtgattctaagcccagatatgagagtgaacatctttaataatggctgagtttagataggagggtcttcatctgcctatgagctgggtttagaaatgagtcaccattccaactgtagccaggtgttcacgtatgcagtcacaatttcaactatgaatggcatccacgagtttgattcaggacctcaccagtgggctctgtttatgtgtgacggtgacaaggctaatggttggctgggtgcgcatacaataagaaaaatttctgttgtgttctggatacactccctgtgtcacctgaatttatgctctccatatcacccaagggctttatacaatgtgagaggaagtggcgattttttatgatctttgtacaaagaggagacctggaatcttacctgttctctcagcctagctaggacagagagtgcctttttttactggctaatttgatatatggacctgccaataggggagattttgccttttttattttaggcttagggcagtggataaagtactgggtctcctatgtgaggaaaggtcacataagattatggacactcaagcttatcctataaagcttttgtgttacattgagagtataataacaggatccactacacaggtgagattgttactctcataggcacacctagctgaaaattaggattgtcaccctcacacataagaaaagcccactggtgaggtcctgaatctcacaggcacactccaaaattagatttgtgacagtcatatgtgggtcctgggacagttggtatgctgacttatttttgaagccagcttacagacactttgagatgactgtcatacctatatctggccaataagagagctgtgactctcacacttgggcatagggcaatgggtacaatcttaggttcatatcagcatgaaggtctcaaagtgaattgcaactgcctcttaaagcatataaagcctgtggataatacagagagtgtcataacacaaccaagaacacaggtgaaattgtgactctcctatgcacactcagccaacagtaaacattgtcactgtcacacatggaaactgtccactgttgaggctgtggatctcacacatgggggcagtcaaaagttggaattgtgactctcatacatggatctgcttaacaggtagaatggtgactcaaagactaggattcagaacacctgtgaggctgtgactcttagattcagaaatagttttcatttggaattggggctctcttgcagggagtgagtccaccattcagattgtgattcatgtacttggacccaactcaaatgaggtctcttgactctcatacctgaagtcagaaaatgtgtggaattttgaatctcatttctcaaccttcttgctagtgtgattgtgatatatacatttgcccagcacctgagtgatttgactctcctgcctgggtaaagcccaaaaataaaactgtgatgtatacctgggccaagcatttaagttattttactttcttgcataggccttgtcctcaggggaaattgtgacatatcactgggcccataacctaggttatataatcatcctctcctgcttgggccctgccaatacagatagttgtagcatataattgggccaatcacctaagtgatgtgactttactcttttgcatgggctttgccacagagtgggttgtgatatgtcactgagccctatgcgtaaatgatatgactctcctgccttggtccctccaaaaggaggcattgtgacctatcaataggcccaacaactgggtattgtgactctcctctcttacctgagccctgtacacagggtgacatattgctgtgccctgcatgcagataatgtgtctttcctgcatgaaccttgcccacagaaggcattgtgacatactcctgggcccagtacccaggttatgggacttctctgccatggccctccccacagagtggatagtgacatgtttttggtccagcattcaggtgacatgattctcttttctggtttattcacacaggctaagctttaacatatggtttttccagctcacaggcgttatgattacactcatataagaacccagacaataagaatgattttgaagctcttagactttaggcagtaggtaaagtcctgggtttcctacttttagaagggtcacagagatgtataaaatttatgcatatcctatatatactttgctacagagaatgtaataataggactcagcacacaagtgagattgtgattctcacaggcataccaagccaacaattgggattgtcaattccaaacatgaaaggtcactggtgagcttctgaacctcacacgcagatgcagtccacagtcaaaagtctgactgtcatgtgtacatctggaaacaggttgaatagtgactgatttctggacacagctcagaggcacagtgattagttgcatacctggacctagcaaacaggagatatgttgactctcatagggagccttcaagcaatgggcaaggtcctgggctttctacttgtatgaaggtcacagaggattacaaaactaatgcgtattgtatgatcccttcggtggtacagagagtgtcataagagattccagcacaaagttaaaattgtgattctcataggcatacccagcaaacagtgagaattgtcactcccacacgcggacagagaccactagtgaggtccagagcatcacatgtggatgccatccacagttgaaattttgactgtcatacgtggatctggccacaggtgggatagtgacttctttctgccgccaactcacaggcacagtgagaactctcatatctgacactagccaacaagagagatgttagctcttattcctgggcttacgacaatgggtaagatcatgagttcataacagcatgtagatctaagtgtggattgtgactttcaccagagaaagccctcaggtggcaccaagactgtgataacagggcccagtgcacaggtgagatagtgaccctcatatgcatgtccagttgacagtaagaattttcaccctcttaaatagccacagcctgttgttgaggttctgaatctcacacttggaggtagctaaaagttggaattgtgagtctcatacatgaatcaggtgaatacctgaatacagatgagataatgactcacagaccaagatttgtcacacctctgaggctgtgactactgccaggacacaatctgaaggttgaattgagactctcaggcacaaatccagcccagtatccagattctgacttgcacactaggactgaacacacaggaggtgttgactgtcctccctagagctggacatgtttgggattctgtatctcatccctggacttttctgcaggtgtgattgtgacatatgcttttgcccataccctgagtgattgtagttttcttcttgggcccagcccacagatgaaattgtgacatataccaaggccaaggaccaaggtaatatgactctcctcatctgcctgagcccattacttagaagtgatttttacatatttctgaattcaacacctaggtaatgtgactctcctcttgtgccaaagttttgatcacacagaaaattgtgacatatcactgggcccagcacctagatgatgtgcttgttctgccttaattctccccacatgggacattatgacatatttcttagtcaaacacctaggtgaagtaactcttctctcctgcctgggtctcagcttcagaagaacatgtgacatattgctgcacccagcacttaggtgatttgagtcctctgctgcctaatctttgcctacagtggggattgtgaactattgcttaacccagcacctaaattttgtgactcacttcttttgcaaagttctgctaacagtgggagttgtaacatattacaggaaccagcaaacaggtgacctgactgtcctctcttccctgggccctgcttatattgggcattgttacatattgctgggctcatcgcctaagcaatgttattgttctcttctgcttgggacctgcccacatgatggactgtggcatatcactaggcccagaacccagctgatatgactcttcttccctgatcctgctcatagtgaggactgacatattcctcttctagcatccaggtgatgtgactcttctgcctggtccctgtctgcatgtgggattgtgatatacatctgggctaaactcactggtgcaatgatgacaatcatacttgaacccagcaaataggagagatattgattctctttgctaggcttagggcaatgagtaaggtctgggtgtgtttcccgtacaaaggtcagagaaaattacaatactcatgcatattgtataaggctttcagttggtacagagagtatctaacagggctcagcacacagatgagactatgactctcaaatgcacacccagctgacagttaggattttaacttacacatgttaagatcacaaatgtcacatgtaaatgcagtttgcagttagaattgtgacttatatgtggatccagccacaggtgggatggtgactcacttccgaatccagccgacaggcacagtgatgattctcattcctggatgcagcaaattagagagagaggttgactctcatactgggcttagggcaacaggtaaaataggtcataccagcacaaaactctcagagcagactgtgactctcatgcatatcatataaagcctttgggtgatacagaaaatgtcataacggtgccaatcacacagggaagattgtgatccttaaatgcacactcacccaaaaataagagttgccactctcccacatggacacagctcacctttgaggttctgaatctgacatccagagacagttgacagttaaaatcatgactttcatacatggatcccatccacaggtggggtggtgacgcttggaccagaattcagcacacccatgggcctgttactctcacaccagaacacagcccctaggtggggctgggactctcatgcacggatccaatttactattgagatgatgagtcctgtacttgtgcgtaactcacaggaggtgttgactctcatacctaaagctgggacacgtgcagaattgtaaatctaaccactggaccttcttgcaggtgtgatttttatgtatacatttgccgagcccttgaggaattccacctgcctgggtaggccaagcctacagtgacattaattaaatcaagcatctaggtgacatactctccttcctgggcactgccctcaagggagattttgaaatatttctgggcccagcacataagtaatgggattctttactcccgcctggttcctgcacactgggagcattataacatatcactgggcccaacacctaggtaatatgactctcttctcacgtctgggccctgcccattttaggaattgtgacatagcactgggcctagcacccaggtgaagtaaatatccttttccatttgggttctgcatacagggggcatgataatataatgcagtgcccatcattaaggtgatgtgactttacttcatgggcaatgtccacagggagcattgtgacatatctctggacccagcacctagatgatgtgactccctcctgcctaggccctgcatatagggggaattatgacatattgctgagtctagcacctgggtgatgtgactcttctgcctgagccctgctcacagggggcattttgacataactttgggttcatcacctagatgatatgactcacttcttctgcctgtgctttgcccacaggaaaacctggaccatatcactgggctgagcacccagataacgtgactgtctttcctgggccttgcccacagggggcattgtgacatttcactgggcacagcgctgaggcgatgtgactctcttgcctgggtcctgcccgtagaggaaattgtgacatattcctggtccagcacccagggaatgtgatgatccagcctcatccctgcagccaacagggatgaagatgactcttaagcctgaactcagctaataggagagatggtatctttcatagccaagattagggcaaacaataaagtccttagtttcctaattgtataaagatcacaaaggatcacatcacccacgcatactatataaagcacttgagtagtacagagagtatcataacagggctcagcacacagttgagattgtgactctcatatgcacacccaggccacagttataactgtcactctctcacatggacagagcctgctggtaaaattctaagcctgaattgcgaacacagtccacagttggaattgtgattcatatgtgaatatggccacagttccaatggtgactcacttatggactcagatcacaggaatggtgataactctcatacctggatccagccaataagagatgttcaatctcctacctgattctagggcaatgagtaagatcaaggatccatacaaccatgaaggtctcagagcagattgcgactctcaggtgtagggatatatatatatatatatatatatatatatatatatatatatgcacacacacacacatatatatacacacatatatatgtatatatatacacacatatatatgtatatatatacacacacatatatatgtatatacacacacacacacacacacacacacacatatatatatatatatatatatatatttttttttttttttgagatggagtctctctctgtctcccaggctggagtgcagtggcgtgaccttggctcactgcaagctccacctcccgggttcacgtcattctcctgcctctgcctcccgagtagctgggactacaggtgcccgccaccacggctggctaatttttttgtatttttttagtagagacggtgtttcaccgtgttagccagggtggtctcgatttcctgacctcgtgatctgctcacctcagcctcccaaagtgctgggattacaggagtgagccaccacacccagccctcaggtgtatattttaaagccctcaagttgtacagtgtgtcataataggacccagcacactgatgagattgtgactcttgcatgcacacccagctgacagtaagaatcgtcatcttcccacttgaatacagcacactgttgaagtcctaaatctcatagctggaggcagtcaaaatttggaattgtgtctcagacaagaatccagtccacaagtgagataatgactctctgacctggatttagcagccctgtgaggctgcgagttccctactgggatatagtctgctggtgagattgaggtcccatgcacatgcccagtccaccgttgagtttgtgactcatgtacgaggacccaacacacagatgttgaatctcatacctagagctgggacatataaaggtttgtcaatctcatccctggaccttcccacgaatgtgattatgacaaattcgtttgcccagccccttagcaatttgactttcctgcctgggcccaggccaaaactggaattgtgacatatacctgggccaaacacctaaatgctgtgactttcttcttttgcctgggatctgcaaacagaaaagattgtgacatattgctaagcccagcatttaggcgatatgactcttcctccagggacatggtgacatattcttccccagaatatgggacattgtgacattcctccctgttcctacagggacattgtgacatatccctgggaacattaactagattaagggactcccctctcatccctgggtcattccctcaggggggattatgacatatcactgaatccagaacctaggtgattttttttttctcctctactgcctggaccccatccacaagatgaatggtaacatattgctgagcccagcaaccagatgatgtcactttcctctcctgcctggaatctgctcagaggtggagagttacatatcactgggcccagcacataggaaatgtgactctcccctcctgtttgggccctcccaacagtgggaaatgtgagatgtcactgggctcatcacctagatgatgtaatgcttcttccctttattgatccacccacagtgggaattgtgacatattaccatgatcaacagctaaatgatgtgactcttttctgctgattgagccctgcttatagggggcattgtgacatttagcttcaccttgaacccagatgatttaactctcttatctgggctttgcctatggagaacactgtgacatatctctgcaccgatcatctaggtgaagtgactctcctctcctgtctggttctggctcaaagaagggaatgtaacatgtcactggacccagcacctaggtaatgtatcgctattttctcttaggccctgctttcatggtaaattttgacatatatttggatgtatcacctagatgatgtaactctcttttcatgcctgggcaatgcccaaggggagattgtgacatgttgctgagcccaggacccaggtgatgttagtctcctgcctggccttgcccgcctacaaaaggcattgtgatacatctttgtgctcatcacccaaataatgggagtctttttacctgccagagccctgttcttagggaaaactgtgacatattactgtatctggcatgtaggtgaggtgactcttctgcctatgcattgcccacaggaagaattgtgacatatcactgaacccagaacctaggtgatgtgacttttttcctgtgccttacatgcaaaaaaataaaaaatatcactgggccccagaactaggcgaggtgactcttctctactacctgggtgaaccccttataggggcattgtgacatatctctggccccatcacctgggtgaagtgactatgctcttggctgaataggtgctgcccacagctgtgattgttacaaaatgctgggcccagcactcaagtggtttgactctgctgcatgggccctgcccacagagggcattgtgatatatgtgtgggcccatcaactaaaattgtgactttctacattagtctgttctcatactgtgaataaagtcatcctcaagactgggtaatttataaaagaaataggtttaatggactcacagttccacatggctaaggaggcctcagaatcatggtaaaagataaaggaagagcaaaaggcatcttacatggtggcaggcataagggcaggggaactcccttttataaaaccattagatcccacgagacttattcactaccccaagaagaatataggagaaccacctccgtaattcaattatatttacctgtccttgctcttaacatacagggattgttaaaatttaaggtgagatttgggtggggacacagccaaaccatatcagtgttttctcctgcctggcccctgtccataggggagattttgacatatcactgaacccaacaccttggtgatgtgacgctcctggtccctgccataaaagagaatggtgacatgtcactgggctcagtacctaggtgatgtgactcttctctcctgtctggactctgtcctaaaagagaattgtaagatatcactgagactagcccttaggtaatgtgattttcagctcctaccagggccctgtctacaaggggcaaggtgacacagtgtggggactatctcccaggtgatgtgactcttctgcattggcctggcctaaaggggaaattgtgacatatctctgggcctaccacctagctgatgtgaccttcctcacctgcttgtgctctgcccacaggaagatttccacgtatatctgcgtccagcacctaggtaatgggactcttctgcctaagcactgcttacacaagccattgtgatgtattcctaggcccaagacacaatgatgtgacttttcactcctgcttggcactgtgatatatcatggggctcatcacctagatgatgtaattcttcttttgcttgggccttgcccacaaaataaatagtgacatattgctgggcatagcacctaggtgatgtgatacatctgctctggcctgtaccacaaagggcactgtgacatgttcctgaatttagtgctcaggagatgtgaccctggggccagagctgagtccacaggtggattgtgacgtattccttgcccagaacctaggtgacatgactctttcttcctgcatgggccctgacttctgtgagggttttgacaatattactgggccctacacccaaatgatgtgactctgctgcctgagttctgtcaaaggagggattgtgacctatccagtaggccagaacctacatgactttcctctccttcctgagccctaaacagaattaattgtgaaatattgctttacacagaacccaggtgatgtggttctctaggctaggccctgcccacagaggcattttgacatatggctgagctcagcactcaagtaatgtgactttcttgccagggccctgaacacagggggttattgaaatattcctagaccaacattcaaacaatgtgactctcctgtctggtcttcccacaggtgggattgtgacatacctaggcctagctcacaggcgtgatgatgactctcatatgtggacccaacaaacagaaaagattttgactctcatggctagaattaggggaataggtaaggtcttctgtttcctacttgtggtaatgtcacagaagatgatgacactcatgcatatcccataacatccttgagtgacacagagagtgtcctaacaggactcagcacacaggtgagattgtgcatcccacaggcacacccacctgacaattacaattgtcactctcacacatggacagaacccactgttgaggtcctgaatctcacatgtggacatgatccacagttagagttgtgactgtcctatgtaaattcagcaatgtgtgagatgatgacttatttctggatcaagctcacagatgcaatgatgactctcatatacttggatttagccaatagaagaggtgttgattcttgtagctgggcttagggcaatgggtaaggtcctgagtcttctacttgcagaaagttctcagaagattaccacactcatgcatataatataaagcccttacgtttcaccaagagtttcatattaggtcccagtacaaagttgagattgtgactcttctatgcacacccagctgacgggattatcaccctcacacatggacagagcccactgctgaggttctgagtctcacttgtggatatagctcacagtttgtattgtgacttttatatgtggatcttgccacaggtgggtgtcttatttctggactcagctcacagacacagtgatgactctcatacctggacccagcaaagaggagacatgttgaatcttgtattaggatgtttgtgtgtgtgtgtctgtgtgtgtgtgttttagttccttgagctttggaaattgattctacagtatcttatacagatgtaaatgtatcaggctttttttgtaaagctatatatatatattcctcctgtttattaaaatattgtcattggtgttatgtagatatagttgtagacctcaaaacagaaaataatattgtaaatattatagcttaataaatgtttatggtatctaaataaaaaatgtaaattatacatatttggaaggtagttatttacaattgcttagagcttacctggtcagccaaggcctgccttcaattgcacctgcttggttacagtatctcctggggtgaaatggccctcactgagaatggtcaaaataagaaaaaaattttggcagataaatcttacgtgtaaagaaacagagatgtggaaaaaaatgttcagagaaggataaataaatcaattttaccacagttatttttaagacagtaaatgctttaggccaggtgcagtgactcactcctgtaatcccagcactttgagaggccgagttggcagatcacgaggtcgggagttcgagaccagactggcctgcatggtgaaaccccgtctctactaaatacacaaaaaattagctgaggatggtggcacgtgcctgtaatcccagctacttgggaggctgaggcaagagaattgcttgaacccgggaggcagaggttgcagtgagccgagatcacaccattgcactccagcctgggggacagagtgagactccatctcaaaaaaaataaaaataaaaataaataaacagattcttcaaagtcaaataaaatttatttaattaaaaattgcagacactgggtgcggtggctcatgcctgtaatctcagcactttgggaggccaaggtgggtggatcatgaggtcaggagtttgagaccagcctggccaacatggagaaaccctgtctctactaaagatacaaaaaattagccgggcgtgttggcaggcacctgtaatcacagctatttgggaggctgaggcagaagaatcacttgaaaccagaaggcagaggttgcagtgagccaagaccatgccattgcactccagcctgggcaacagggcaagactccatctcaaaaaataaaataaaataattgcaaattggagtgagccgagatcatgccactgcaatccatcctgggtaacaagagtgaaattctgtctcaaaaaaataaaaataaaaataaataaagtgcaagacggcctatagaagcactgaaaaatctggaaaattagcaaaatgttcatgaacagttgaataaataaattgtagtgtatttatatgatgtcatattgtagatcaataaatatgcaaaccacaagcagcaaaattcagatagtggtcactttcgggaagtaggcttatagaagactttagaggtatgtactttatgagagtatgtgaggattatatgaagccagactgaaagtttcctgagagtagagaccaaaactttctttttattttttgagatggagtctcactctgctgcccaggatacaggtatctgggcccagctaatttttgtatttttagtagagacagggtttcactatgttggccaagctggtctcgaactcctgacctcatgatctgcccacctcggcctcccaaagtgctgggattacaggcatgagccaccacgccaggccaatactttcttttcttaattttatctcccaaggctagcaaaaagcatagcacaacgtgtatgctcaatgcacatttattggttaaatgaataaatacataccctttgtaaactgtcaagccctatgcaaatcaagaatttatttttattacttactacagtttagttaatagaatcatataaaaggtaatcaaagttaagattcagaaagcactattcaaaatttaatgttaccccagcattcttaggcaaaataaagtaaaatttatagtttctaaatttgtgaccattataattacatttaaatttccatgtgaggctggaacataaaatcttccatcaggtgagcataatttgagagaaaaatacatttaaaaataaagaaaaaacaggaaaaagaatgaaaacttggttgggttagatctgcaagttctattccatacttctttttttttttttttttttgaaatagcttcccatactcctggtgcagagggaggctgaggagcctgggtccctctgtccttccactgtggcagtggctgatctctgctcaggcatgagaagtgctgccctgtgctgggtctgaggctgccctgcccagcccctcctcactcccttggactcttcacagtgtctccaggctcctgtgccatcctgagcatccctttgatggaaagggaggtggcagcaggaagccagtaggaggaactggccctgcagaccgagagatcttgtccaggaaatgctctggttggccttggcttttggtgcatggagctggacatcaaccctgggttgtagctaaggtgtccctgggctaggtgaccctgggcatggatgctccagttgctgctgccattcctgctgtgctcagctgggccgcagctggaaccattgccagtcagaggtgcaggagcagccctccaggtgggaggaggccatagccatgcatggttcctggaaaccaggccctgctgacaaatcttagatgccaggaacagaagaaccaggagaaactgcctagagcttgaggcaaatggatggactgttggaatggctgagggtgaagctgcccaaaatcctcaaagtggagtagcaaagcaagcatcagagatggacaagaaaaataaaagtcaaaaaaattagcagaaactgtagcaggatgagccgcagacaagaacccctcagacaccaagttgtggaaggaaagggctttattgagctggtagcatcagcagactcacgtctccaaaaactgagctccccgagcgagcaattactgttccttttaagggcttacaactctaaaggggtccacgtgagagggtcgtgatcgactgagccagcagggggtacctgactgtgggctgcatgtaccggttattagaacagaacagaacaggacagggattttcacaatgtttttccatacaatgtctggaatctatagataacataattggttaggtcaggggtcgatctttaactaccaggcacagggcatggtgctgggctgcctgcctttgggtttcatttctgctttttagtttttacttcttctttctttggaggcagaaattgggcataagacaatatgaggggtggtctcctcccttattcccccactttgagaacctcactcattagtgggagttctcactttcatcctcactacccatgtcttcttgcaagacagattgatagtgattcatatagtacacttgtgctgaagcattttgatgcactaaagtagtaacaaaacttttcattacttgaaggagcaaaggcagcacacagggaagcaacatgcaggtttctattactattataattcctattatagtagttttaaatcctcctagtgctggaaaccattttccaaacatggacctaggattaaacccatgccacacctgcatgggaacatgtgccagctttgttattttaattatatcttcaactatttgcccttggtcatctatgtgcagacagcaattggtcatgttaaactttccacagatccctccttcagctgctagcaagtagtctagggctagtctacttttatagatagcatttctcatctggatttcttgcagggctaaaacagttaaagctctgccagttttattagtgattatttccaagacagcttgtaactgtgtgattcggttgagcatataaatgggggttcagtatccctacgagccatcttgtgcccaagtggcaggcccatagtactgtatgattctttcaggggaccacttgtcatcttcccagtcgcctatagctatccttctcttttctcggggagcatagacatgacagcctaggagcttgcctgtttttatgggcagtaggaaaaaggacagtttaatggtgccaataacacaactacctgcccattggtcaggtaacttggcataagctctatgcccacatattcggtataattcagaggaggctgtccagacctgatgggactccgggtgtctccatacagtttgcaactttggaaatttgctaaacggatttctttcagtgtggtttgaactccaccaggtggctgcttttgtagtgtacagtttttgcccaaggcagctgtcttcccacaggaagggtgaagtccttcctcacccgtgctatacagtattgtctaataattgaggtttttcagaacccagaagttgccagtctttaatcttattttaaaaatggtagtcatagggggcttagatgggttatagcacacatcaggctggtcacttcctgggctacataccctgtatagcattatacaaataagttcctcttagagtcccggtacacttacaataaccataaaataatagggctgtagtaaccttttgtcttacctcagtgacttgatgtatatgtagggaacagtcctcagtctgaggaaggtcagttgaagtccttactgtacaagtccaaattttaaggaaaatgagtcccaaaatgagtttcctcatgctttggccatgtgtggatcagtcagcttctgggtatgactggatcagggcttgtagtcttctgaatcactttgcaagggttggtgaagctgctcccatccatgtacccagtctactgatgtttaaggatggtcttggaggttgggcctgctagaataaactgagtccaacacctctacacagttatgttcaactgcgctctctgatactgggagcaaagtggcggggttcagagtgttgcaatcttcaatggttatgcgggaattttcacagagcaagctttggtatttagttagcctagcatttgttagccaatgatggcctttggtatttattaaagtcactacagcatggggggcctttatgtttaggttttgcatacgagttagcttacccacttcctgtgctagctgggctgttgctgccaaggccctcaaacatgggggccaaccctaagaaaccccatctagttgtttagagaggtaggccacgagcctcggccaggaccccacagtctgggccaaaattctaactgctaatttttgtctctctctgacacatatagtgtaaaaggttttgtcaggtcaggtagccccagggctagggccaacatgagtttttctttttaactcatgaaaagcttgctgctgttggttgtaatagatgtagtttatccaatctacatttttattaactgtcactcaccaaaatattcactcaaatcctgcagctatttgattttgggctttaaattgacctggtgttccctgtgggactccaattgtgtctaaatagacgtgagcatcagaagacccataaggggcttctcccactttatgatgttttatttttcctccctctcgttgatgaaatgccagggtgaaagggatagccaattggactaaagcacaagtgccactccagttatttggcagagtgcccaataaagatccaccacaataccaccacacatccaccagggatgaacaagggctgactgattgataaactcttgaaaaaaaattttttttgaaatggagtctcactctgtcacccaggctggagtgcagtggtgcgatcttggttcactgcaacctctgcctcccgggttcaagctattctcctgcctcagcctcccgagtagctgggactacaggtgcctgccaccatgcccggctaatttttgtatttttagtagagatggggtttcaacatgttggccaggctggtctcaaactcctgaccttgtgatctgcccaccttggcctcccaaagtgctgggattacaggcgtgagccactgcgcccggcccagctcttgaaaattcttaagctcactgcatcccttcaggtctccaaggaacactgtttcctccctgtcctgagagacacgaagtgaacttagtgttggaaaatggaggctggatggccctcaggggctgacccgcaaggtgctgtatttcgggatatagcagagagagagcttggcatgactttttaccctaggctgtagaatcttggaaaagagctacaatgtaacccaggcccatttgactggaggaccaccctagtggaaaggggacaatctgggcctctggcctgccatgtgctcaagcataacaattgcttttgtttaatgtgcggatggaatatttgatccactccaaccaggcatttacatcttggtatcctgtcttaattgccaaagtttgttttaggtttttaacttctatgatcctctagtaaaatgaatgtatgattttaggaaattacaaaaatggttggggcagtccacacttgctctttagtggtccacagaatgttggatcaactatggcataaaagctctacattggggggcaagaatcgtggttgacactggggtctttatcaaaatctccgtggattaaatggtcctaatttactaatgcccagtctgaggagagtcaggagggacagaggtacttttctgaagtagagagctgtctttgacttggcaagtccccacagggtataacaaggcaagcattaagtgcaacagtttgaggcaaaattgacttggttatgttaataactagatgatcagcaatagagcaaggaaagaagaaagagtaataggatagatgaaagagagttaaatttttcttagctttagtttggtaggggtttcccctgggactatggcccacgactctggagggggtggcactttcttgactcaggtatgatgagtccatcccctttttgctgtatgaacaacagtctcagtggttagcagcacaaggtagagcccttcccaggctggctcaagtttttcttctttccaccctttgataagaacatgatcttcaggctggagctggtttaccaaaaattctaggggtggtacatgtgctaaaccaagtatataatttttaagaaactgaccttttgttttaaatgtgaggacatcagcagtggattttatagtccttggtgcctttttactgagaaatttcctttagcgcctatttttattagtttttagaccaaagaaagccaaacaccattttatatttgacaatgcttcttgtatgatttttataccagataagctaaatttcacatttatattcgtgtgttattaatgttaaacttagttttaataaaactttgtagacatatttatccaatttttaatttctgaccataaggtaagatttttatagactctttttaaccttttataatttttgttaaacagcagattagtgctttaagaaaaacctgttgtgtttttattttaatgttccgttcacagaaaaactggatgatacccttttaactttagccaatatgtttacacacagaatttcctttacaattaacattttaaaacctgcttaaaccttcaaaacaaatttttttaaccttttcatgtaggtaaaaatccacattcttatgcctccttataatccttttaccagaggtgtattttactttccttatacaccttgcacataaactgtatttttcaatagttttacattcaggaggcctagttacttttaaattatacatttattgcataaattctttttttaaaacatttttttcacaactttcacagacaattctttgacatgtctcaactttctgacttattacaaacatttctttctttaagcaaccagttcatttatttcaggacaagaatttaccatataacattctttttacaaaaattctgctgcctattttttttccctttttgttttttctaagataaccattcttttccaaagcgaacttcctttatgtctgtggactagactaaggccacaagattagaagttactataatacatgttacactgttaacttttagcaaagtttacttttgttgaaaaccttgtaagtttgggatttccattatcctttgctattaataagaccttgtttagtccaaattaacttagaattggtatagatggctgtttttgtttgtttacccaggaggaaccatctatcaacctgtcctgaagggagttcctcctaggtctggtcggacctttgtatggtaattaagatttagatcccccattaggggattttcagtggttaatgttgtcatcttttttttttttttttaacagaatagccctatactttaagatttttaagttagtaagctaccttcttgctttttttttttttccttagggtacttctgaaccagtggggagtgctcacaatgaggttttctctaaaagttatttttctactttcttctgttagcaaagcagttgccactacagattaaatgcatgtaggccatctgcagattactaggttaaggatttttgataggaaggctacagcttgtcagtggcctcagtgctttcaggctatgcccttgtttacagtcacaacaaggtggtattggagagttgtagggtcatggagaagaccttcaattatcaattataggttttaaatttatcctggaatagagtacactttttttcttaactacttgtatatctctctttctctctttgattttctctctctttgactttcctttcacctctgtctctttctctctgcctctctttttttctctctctccttgactccaactttgtctctctgtctcttcctctctctctttgcctcttttcctctctgtctcttttttttctctctctctctctctctgctggtctttccttgcctctgccagccgcttatgctgctgttctctcaaccactgtgggaggggtggggggagtctaaaaccagctgtgacgaagtgtctatgtatgggaactggtctcggtgacctggctgacaggttaccttgtgacatacctctgaaacaagggacctctcaaggcttccttctgatggccaacccacctctaatgctggccagtctaagttacacaaagttttaagttttcctggtgtcatagtattccatagtctcctttaaatcctttcttgaaatttttcaacataattcctagtggggtgggcttactttgtgcctgatccatgcttccttgagacaaaacacctgctcacaccacacacacaccacaaaacaagaacaggtaaaaagggcacacacacacttttacagtttacaccaaaccagaatcaaaaccaaaatcagagtatcaggaaatccaatccaggtcaaaaccaaaaccaaagtatcaagcaatccaagtcaagtcaaaaacaaaaaccaaagtgctggtacaggcacaccatgggtgatcaggccatgcttccactcaaatggagtgggcaagttccaaagaccagtcttaccaaatttcatatgtccagactccaagtgccaattccttcctggtgttcagccactgtgttgatcctccgtgagggcctgccacatgcttctctagtaagatgtcccaccggggcaattgcctacctgggagcactctttggatctgcgtcactcaggctgattggagtcccccacagggatgctccacagggcaggcctcagtcacctaaggggctgcctcgacagtccaccaatcacctcacttcctggtcagagaaccaagaaatgtagcaggatgagccacagaaaagaacccctcagacactgagttgtggaaggaaagggctttactttattcagctgggagcatcggtggactcatatctccaaaaaccgagctccccgagtgagcaattactgtcccttttaagggcttacagctctaagggggtccaggtgagagggtcgtgattgattgagcaagcagggggtatgtgactgagggctgcatgcactggtaatcagaacaacagaacaggacagggattttcacagtgcttttccatacaatgtctggaatctatagataacataatcgattaggtcaggggccgatctttaactaccaggtccagggcacagtgccgggctgtctgcctgtggatttcatttcttccttttagtttttatttcttcttctatctttggaggcagaaattgggcataagacaatatgaggggtggtctcctcccttaaaaccaaaggcagatgctaaagcagtgcaaaactgttcatgtcacaatggaaacggagttgatgaaggagtctgggaaacgaatcttagtcacagcaagaaaggacataagtgaacatggcaaggtgctgacaattctggtctactggatcccaccatccctaggacagtcaccacccagcaagctacaactgcatcatttcctgtttgttccaaaatgaataaaggtgattcttatcacaagggcaaataaaaagtcattttttttttttttgagatggagtctctctcagtcacccaggctagagaacagtggtgcaatgttggctcactgcaagctctgcctcctgggttcacaccattctcgtgcctcagcctcctgagtagctgggattacaggcatctgccaccacgtccagctaatctttttgtatttttagtagagatggggtttcactgtgttagccaggatggtcttgatctcctgacctcgtgatccacccaccttggccttccaaagtgctgggattacaggtatgagccaccgtgcccagccaaaagtcattttttaaaactaaactgtcatggttttgtttactttttgaaagttcttataattttgaaagttcagttgacacttgtatgatttaggaagttttcaatagtcttacagtacttgaattgttcaaagtacagtatattttaaattaagaagagtaaactgtatgtgttatacatatttaaggctcagactcacaaataatgctcctgtttatgatttgaaaactttgaagtttggttttccatctgtacatacacagaacagtgtagcgtgcaaaaacatttgttctttaaagaggcagccacactttttgtctgtctggatatattttggactttgtatattaaatgtaacataaaaccgttcattttgttttagaaaatctaagattgatgtacacaaactttagaaattactgtagcaatcagcaaaccatgtatataatgtgaaactaatatatctatttttgatgtctaaatctttttgtagaaaaaattggtttctttaaaaatgtctccacaaactcaggcttattttataaaatggcaaaatagtaaagaaatgggtggtttggcatactatatgaatactggcactcaattaaaatacagaatatttttatcaaaattatttagaaagtagatttaaataatttggtttttcacttcagtgatagacattcacaaacatttaaaaaatcaaatctggctggatgcagtggctcacacctataatcccagcactttgggaggctgaggcagatggatcatgaggttaggagtttgagaccagtctggccaacatggtgaaaccccatctctactgaaaatacaaaaaattagccaggcatggtgacaggcacctgtaatcccagctactcaggaggctgaggcaggagaattgcttgaacctgggaagtggaggttgcagtgagccaagactgcaccactgcactccagcttgggcaacagagtgagactctatctcaaaaaaaccccgcaaatctattagtattaggtttgatttagtgttgatatatacataagatcaaaaatctgttaaaaataaatatttttcatcgctaatttggtgtgtttttttgtttgttgttttgttttgtttttgagatggagtctcactctgtcgcccaggctggagtgcagtggcttgatcttggctcactgcaagctctgcctcccaggttcacgccattctcctgcctcagcctcctgagtagctgggactacaggcgcctgccaccacgcccagcttatttttttgtatttttttagtagggacggggtttcaccgtgttagccaggctggtctcgatctcctgacctcgtgatctgcctgccttggcctcccaaagtgctgggattacaggcgtgagccaccacgcctggcctaatttggtgtttttaaatacccagatgtcccattttaatcagattaagtctggggaaagttgactaatcttatttaattttttgtacagtatgttcaaaatgttctggtttaacctaatagcaattaatgatgagtaaacaatttttctttcaaatctcaggcctgttaaattgctgaagctatttttaatttaaaaattttgggccgagcctggtggctcccgcctgtaatcccagcactttgggaggccaaggcaggtggatcacttgaggtcaggagttcaagagcagcctggccaacatggtggaaccctgactctactaaaaatacaaaaaattagccaggcatggtagcatgtgcctgtaatcccagctactcgagagtctgaggcacaagaattgcttgaactcaggaggtggaggttgcagtgagccgagattgtgccactggactccaggctgggcgacagagcaagactctgtctcaaaaaaaaaaaaaaaagtctttaatgttgtttaaagggacttaggtctactctaatcttctcaacctgttaatcagtgtcaggtgccaaattccaatttattttcagggtgcctgaatgacttttctttgcatagtctttgaattaaatttccattaataaggacagatttcagtacatttaaccagttgcttttagtacctccaaaggtagtatacaaagaattctcatgttattttctaagaaaacagattctactgttacctgagaaatcaactggaaggcatttttataaccttgcaccacataaaaaaatgcaatgtagtactaataaatgcaggctacatcacacaaaaaatggtaatcaagaataccactttcaatatttaaatatttgaaattttggtaaaaagtgtggtaaagtataacttttagtaagctttgtgcagctaaacatcagcataaagtaggaaaagatctttaaaaatgaaaacaaatgaaaaccgacaccaaaaaaactaacatccaccattgcatacatattgatctctgtttcaaaaaagtctgaagcagaacgtttggtgaacttcatgcagttattttcactacactggaatactgataaaatcatttatatttaatttgagtaaagcatgttcacatcttaaaaacactgctttgtagctgggcgtggtggctcacatctgtaatcccagcactttgggaggctgaggtgggcagattacgaggtcaagagttcaagaccattctggccaacatggtgaaacccatctctactaaaaatgcagaaattagtcatgtgcggtggcttgtgcctgtagtcccagctactcaggaggctgagtcaggagaatcgcttgaacccaggaggtggaggttgcagtgagccaagatctcaccactgcactccagcctgggtgacagagtgagaccccatattaaaaaaagatactgctttgtactatgaataataaatgtaaaatctttttatttacttatttatttttaatttattttgagacattcttgctctgtagcccaggctggagtgcagtggcagtgatctcggctcactgcaacctctgcctcagcctccccagcagctgggactacaggcacacaccaccacacccggctaatttttgtatttttagtagagacgggtttcaccatgttggtcaggttggtgtcaaactcctgacctcctaatccacctgcctcagcctcccaaagtgctggaattacaggtgtgagccatcgcgcctggctataaagtctttatactcaagagaatcctgattctcaactcaacatatatgggcaaccctttcctctggtgtctttaaacggaagcctcattaaggctcaaatatggagtgaaagggactcaataacagcatttgaagcaaaaaggatgaggtaggatggtcagctctgaggctcagggattgcctgggggactccagtatgatgtaactatgaagcttactgcatacaagtaaacattaacagccgaaaacaccatggcttgaaattggtgagatagaatctctgaaatcataaacagttgcaccaaaaagattgacccagagtgacaagtaactaaggattactaagggggagtgtttacaagcacgtaagtttttgttccaaatcttattacagtagcaatatgcttttctgtaatgtcagcttccccaagctacagatgctatagacaaactacaagtgcctaatatgttgtttgcagtcagtgtcttaatttagaaaactttcaataatttcatgaatttcattgaaatctgtttcatgtataaatctcactgaaaggcattattcagtagctatttccctcagtattttggggaattttctattgcttgatttcaaaccaactttacttgaatcctagtcatttctaaagccccagatgtaatagcagaaagacagcagaaatgatgccaagttactccaaacagttcacgtctaatatatttggttccccaaatgaaccagaaaccacacaagctaaacaacagtgtatttgaaattcaacctaaattcaacagtaacagtcaaaaccctatgcaaatatcagcacagtcacaatgtagaaacccttagtcttttattccagagaaaataaaaaaattcttactttggcattttctggaaaggataaatacattaaacatgacaaaatataccaactcacataatatatttgaaatgtgaatatttattcttaaatatttactgtaatatttaaacaagactttcagtgaaaaatacagctaccatgtgttaaaacagccctgagtgagatagtattttttattaataatgaagattgaagcttcagaaatgcaaaataaataatcctgggcacacagctagaggaaggtaacttaaagtatttgaaagatgttctctaagactctaaaattattttgttttagcttatataaaaaatgattaagcatttttaattttcaaaaaatgtaagtgcattctgtcaggtttttctgaagaatttaaatagaatagagtaaaattatacttatcaaaaggtaaacttttctattaatagagcagtttaattttcacaccctgagtaaaatcttacaaaatttattgcaatttaatcagaaacttctttctcacactgggagagatgacacaaagatgcagctttcatgttgggtgagagaagaaatgatcaccggaggtagataattgttgtttcactaatcaatgttgatttttattgctattttgtctcaaattatgttaataatgaagtaatggccttgatccaagaattttttttttttttttttgagatggagtctcactctgtcgcccaagctggagtgcagtagcgcgatctcggttcactgcaaactccacctcccgggttcaagcgattctcctgcctcagcctccctagtagctgggactacacgtgcatgctaccacgcccggctaattttctgtatttttagtagagacagggtttcaccatgttagccaacatggtctcaatctcccgacctcgtgatccaccggcctcggcttcccaaagtgctggattacaggcgtgagctaccgcgcccggcccccaagaacttttttaacaatttatttttaaaattagccaaaatattatccataaggcagaaaaatgaagatattaacagtcataatttgtattttaaattaaaatacttttagaaataaaaaagaaaaaatatataaaaacaaatgaaagagaaggaagtaggttactcacaatagctaagatagagaatcaacctaagtgtccatcaacaggtgaatggatgaagaaaatttcgtgtatttacacaatggactgctattcagcccttaaaaataaagaaatcttgttatttgcaacaacgttgatgaatctggaggacattaggctaagtaaaaagagccggcacaaagaaaaaagggaaacaaaaacataccacatgatctcgttttttttttctcaaaaaagtttcaattttatttagctttgtgactttgtacttgtgccttcaacactttcacaacgattttctgctccccgataaggaaagcacgcttgatcctgccacgaacacatttagcacacatggaaccaccataggccctgctgacatgtttctttctttttgacaatttcataagaactttaggtcttacagcacgaacccctcgaagtcttcctgggcacatgccacttgcagatcttggtgctttcccaaccttcttggtataaaggtaaacaattctattaccaggggttcggggcagtctagttttgttggacgctgtattgtaggaaagcctacattggtatgtcaaacgctggaccattctgagtgcctacagacaacgtcactggaagagccacatgatctcatttctctgtaaagtagaaaaaaattctaattcggccgggcgcagtggctcacctgtaatcccagcactttgggaggctgaggtgggtggatcgcctgaggtcaggagttcaagaacagtctggccaacatggtgaaaccccgtctctactaaaaatacaaaaattagctgggcggggtggtgggcgcctgtagttccagctacttgggaggctgaggcaggagaatcccttgaaccagggaggcggaggttgtggtgagccgagatcactcaattgcactccagcctgggcaacagagcgaaactctgtccccccgccccgccctcctcccgcctcaaaaaaaggccgggcatggtggctcacgactgtaatcccagaactttgggaagccaaggcgggcagatcacctgaggttgggggttcgagaccagcctgaccaacatggagaaaccccatctcttctaaaaatacaaaattagccaggcgtggtggcgcatgactcccagctactcgggaggctgaggcagaatagcttgaacccaggaggcagaggttgccgtgagcagagatcaccccattgcactccagcctgggtgagcagagcaaaactccgtcttgaaaaataaaaaaaaaaatttaactcatagaagcagagaatagaatgatgattggctgggggtggagatattggtcaaaggtaatgggtctttcctatatctcttactttaataaataagttattcttttctcagttttgattcaccagggaattgtgtcatatcctgaagaatcaaaacgggaagaataatatattaattaaagcaatgcaagttgtatactaaaatttcagaggcttagtaaaataatatattttatggtcacataacaatttttttctcattaagaggacttctatatgatctttcagggatcatatcttctttcatcttctttctgcgtccttctctttcttcagccaatggatgaaaaaatagatgcagagaagacacatttggttcttattcacacttcacttccactcactattagtcagtgtggatagagccgagaatagcagtttcctggcaggacagccacttctcagcaataaacaacacactgaaagaaaagtatatatctttcatcaaaagctaatggattttaagcaaaataagcatatgcatcaataataaaatgcttgtggtaaaataaagatgaattttattgatttctattgagttccggtaatatttgaccaaaagctagcaaatatacagcaaaaaaaggaatattatttgaaataagaatattgtgaattaagttatcctgtcaacagaagtaaaaatattatggcatcatactaataatttcatctatagttgtacaacatcaaatgctttttattaaaaactgtattttatatcaatattccatttatatcaccctcgttcactatttcaatgccgtctccactttatatcagtggaaacaggccggcctgctcaaggagagcacgtggtgccattgctatgttaatgacgatgatgaagagaacttgtttgggtggtgctcaaagtactggttttctgtttttctctacatttacaaataaaataaaattcttagctaaaaagactctatctcattgaaatatgttttatgaaatttggttgacatttaagtgccactgatttatctggaatattgaaatttttatgaatccaaattgagtactataagcaatcttttactaaaagcctttgtgagtcagaataagattcattttttttttgttttttttttttttgagatggtgtctggctctgtcgccaggctggagtgcagtgacacaatctcagttcactgcaaactctgcctcccaggttcaagcgattctcctgcctcagcctcccaagtagctgggactacaggtgcgcatcaccatgccaagctaatttttctatttttagtagagacggggtttcaccttgttggccagtatggtctccatctcttgacctcatgatctgcatgcctaggcctcccaaagtgctgggatcactgcaagctccgcctcccgggttcacaccgttctcctgcctcagcctcccgagtagctgggactacaggcatgcgccatcacgcccagctaattttttgtattttttttagtagagactgggtttcaccatgttggccaggatggtcttgatctcttgacctcgtgatcagcccgccttggcctcccaaagtgctgggattacaagcctgagccaccatgcctggctcaaatggtttttctaattgttacttttatcatgttaatctaagagaaactatgtgcatactgattatgcattcaagacatattaatattaaagatctgcccacctaggcctcccaaagtactaggattataggcgtgagccaccgcgcccgaccgatcatgaaatttttataatatgaaagaaatgtgttaatcatgttcctagtaatcactttaaacacagcattatcagttcccagtattcaccctgagtcactcaggggaaattgtattaaacaattaatattaaagtgtttaaagtttaatattatatcacagcatggaatcctctaaaatgagttcattattaataaattcattatgttttcgaggtttttcaattgtgaaaacaaataataagatatgctttttcatgataagctcaattctaggaagttacccactggtctccacgttatttctgtaatgtgtagtgtaacactgggccaccagaatggtgcagatatgctgatttaatgagaataaaaatgagtacagcctccttggctgactattgctatcccagaggctgatcattcactacaacttagtaaatgctgctccatcatgccagtgagccctttcaaccaggttgcccttttcctcccattgatttgctcatgttgtggtctcctctctttatcttaagctatcccagatgagaggtgattatttcttgaatgaaggatatcccctttttatctctgtcatgagatcctcccttccttcctactggaagcaacatgtgggaggcaggaatgatgataatatacaagtatattttcttccatgtggtcaccataagcagcttacatgttccacgtagaagtcactcacttccaggccagcagggtggtttttctacgatgtgtctctttctcataaaagcacctctgactaagtttagcccaatcaggataatcttccttttgatgaacagaacatattagcagcctaatttcatgagtgattttccaccacagtaagtcacattttttttacactccaaaggagaggattacacagctggtgtgcaacagactgggaatcctggtgatcatcttagaattttgcctacccacctgcatagactattaaagtagttttgaagtttcttttgttatctaagtaaacaaagatatcatttgcaaataataattaactaccttcccattttattacaaatattaacatcttttttctggcttatttctttttcatgtaccattttatacatttacactcatatataacaatgaaaatgtattcaactattcaattgaatacaattgaagcatatcaatcattttattaaaaatgattgttaggctgggtgcagtggctcacgcctgtaatgccagcactttcggaggccaaggtgagtggatcatctgaggtcaggagttcaagaacagcctggccaaaatgggaaaaccatgtttctactaaaaaatagaaaaattagccaggcctggtggcgggcacctgtagccccagctacttgggatgttgaggcaggagaatcacttgaacctgggaggcagaggttgcagtgagccgagatcatgccactgcactccagcctgggtgacagagtgagtctcaaaaaaaaaaaaaaaaagtataaatacacaatggaatactattcagccataaaaagggataaatccagccctttaaaacaatatagataaatttggaagacattatgctagctgaaataagactgacacaaaaagacaaatactgcatgatctcatttacatctagaatttaataaattctacctcaaaaaagcagaaagtggaataatggttactggaagctgggtgtggtgggaaggaaataggaagttgttgatcaaagggtacaaggttttaaatagaaaggataagtagatttccagatctattgcacagcaggatgatgacagtaaactataaagttctttttctttcttgtttctttctttctttttctttctttcttttctttcccttccttcccttttctttctttctttttttttttttttttttttttgacggagtttcgctcttgttgcccaggctggagtgcaatggcacgatctcggctcaccgtaacctccacctcctgggttcaatcgattctcctgctgtagcctcccgactagctggaattacaggcatgcaccaccatgcctggctaattttgtatttttagtagggacggggtttctccatgttggtcaggctgagtcttgaactcccaacctcaggtgatccggctgcccccctcggcctctcaaagtgctgggattacacaggcatgagctacggcgcctggccaagtactttatttcaaaataactaaatttcaaatgtatcaccacaaaaaaatgattggtaagcaagttgatatgttattaaactcgacttatatcatatatatgcatatattgaaacatcacattttacgccataaattatacaactctgatttgccaatcaaaaatactattaatattgggtttttttaaatgagagaaactttaagaaattgcaccagagaaaaaagtgttcattcattttaaaatttcagaaaacatatacatattttatttcaatggcttgctcagttagtgatgtaagttagtaaacttttaaaactatgaatagtctgaaccaacactcaaataaagtatgttgatttttaatattcaaaataatataccttaaaagacagactctaaacaactggagtaaaacctctctaaatttgtaaataaataatttttttcacttgttagacaaaaaaagttctttaaatatatatattttaaatacatttaggccaggtgtggtggctcacgtctgtaatcgcagcactttgggaggccgaggtgggtggatagcctgaggtgaggagtttgagaccagcctggccaacatggtgaaaccctgtctctactaaaaatacaaatagtagccaggtgtgttggcgggtgcctgtaatcccagctactcgggaggctgaggcaggagaattgcttaaacctgggaggtggaggttgcagtgtgtcgagatcacaccactgcattccagcctgggtgacagggtgagactctgtctctaaataaataaacgaataaataaataaatttaaccaaataaacataaatcacaagtttattaaacaagtaatgaaacaatttgcttcattctctaattataaaactgacactcagcatttaagtggttgtatgtctagtgttactagtgtactagacagcaattctcaatgagacattttttcataatatttatatccatgctgtatgtgaatatatgggaatttgccaaggatagtgttagaaacattcaactactattatagccccagatggaagaattagaatgaacatgggttacaagccagtggtatggccatcttgttttcaggcttaacatttgtcatgatctaacagaatcaacaaataagagctaataaacttcctgtacactagctatgtgctgggcatttttatggctcctttatttgcattaactgctttaattttaccaaaaccctaggatttaggccctattatcctcactgtacagctgaagagtcatgcacagagaggcaagaaactgtgtttaggtcatataaccgttaagtggccgaactgggatgcagtcaggaacaaccaaacactgagtttcaattttaaccattatgctcaaccccacctcaaccaatgtttgtttttattcttgacctaatattttggctttaaattttaaatttaatagaaatacataggaatttaaaaaccacttctttttaccataggtagtatttacaaatcgatttttggtttaaagtactcattactggccggtcacagtggctcacacctgtaatcccagcattttgggaggcagacgcagacagatcacttgaggtcaggagtttgagaccagcctggccaacgtggtaaaaccccgtctactaaaaatacaaaaaattagctgggcgtggtggcgggcgcctgtaatcccagctacccaggaggctgaggcaggagaattgcttgagcccaggaggtggagactgcagtgagctgagataccgccactgcactccagcctgggaaacaaagcgagactccatctcaaaaaaattgctaagcttaacacactttggtaaatagatactaacaatggttttcctctcatgatttctaggagccaccaattttacttttgaaatatattgaatttttgtattaaaagcaagaatgagcctattattatataatttgtggtatccatgtacattattgtatattgagtgatctacagtttctgaaagtttcagaaactgtataactttttttgattgaataatttaagaatattaagtcttctcagtgaataaaatagattgaaattactgattagtcacttataatgcagcattaaatgttatttaataaatacttgaagctttttaaactcattttaacaacttctattgctatttcacttttattagaaagaaatattaacatttacattacttacaggcctctgaattttattcaaatctaaacatagtgctaattttaggagatctgtatgattaggattatggaaagcctttcctttatttacaagtagaagataaataactgctttccagtaaacacaaagaagcaaatttgattcacaaaagctattaaaatattaatactatcatctagatgaaacttttaggtatctgcattttcaagttgtttaacacataacaattcagaaactagtttttatgaaatataaataactaaaaatataaagttatcaatttttttcagttttgaaatactgtcattatttccagttgacataacattaaatttcagagctgtggctgttgaaactaggaagtcatggttgactctgctttacttgctgccttcttatttcacacaaacacagcagcccaaagatcagaaatgttacacctttattgtaaacacagcagtagctttctagggagaatatatatgtgtgtgcatgttaacttgaaattcacagcttcttttgttgaagtacagacttctatatgaaaaataatgggctgggtgcagtggctcatgcctgtaatcccagtaatttgggaagccgaggcaggtggatcacctgaagtcaggaattcgagaccagcctgaacaacatggtgaaaccctgtctctactgaaaatacaaaaattagccgggtatggtggtgagcacctgtaatcctagctacttgggaggctgatgcaggagaattgcttgaacccaggaggtggaggttgcagtgagctgagatcatgttattgcactccaacctgggtgacaagagcgaaattccaactcataaaaagaaaaaagaaaaagaatgaagcaaatatagaatcaaaaaaattctaaaaattccttctgaccgattattgttttttcctgagaatgattgtgatggaatggttgcagcagtgtggttttaacacacaatctctgtttcatcattcttcagctatggtcataagacttctatgcttttttaaagaaaaatattttctcttgttaactcagtaatttacatgatcttcacagcctcatattttcaaaaatagttcattctttaaaaaaagaaaagtaattaaatcacctaccacttttcctcaaaaagagtaacaaattaatcatatagtctagtgtatagttaatacataaaaaatacaggtgtagagtcatcttttttaaaattatacttcaagttctatggtacgcgtgcatgtttgttacatatgtatacatgtgccatgttggtgtgctgcacccattaacttgtcatttacattaggtatatctcctaatgctatacctcccccttccccacaccccacaacagaccccggtgtgtgatgttccccactgtgtccaagtgttctcattcttcaattcccacctatgagtgagaacatgcggtgcttggatttctgtccttgtgattgtttgctcagaatgatggtttccagcttcatccatgtccctacaatggacatgacctcatccatttttatggctgcacagtattccatggtgtgtatgtgccacattttcttaattcagtctacaattgatggacatttggattggttccaactctttgctattgtgaatagtgctgcaataagcatacttgtgcatgtgtctttatagcagcatgatttataatcctttgggtatatacctagtaatgggatggctgggtcaaatggtagttctagttctagatccttgaggaatcaccacactgtcatctgcaatggttgaactagtttacagtcccaccaccagtgtaaaagtgttcctatttctccacagcctctccagcacctgttgtttcctgaccttatcattattatcattatactttaagttctatggtacatgtgcacaatatggtttgttacatatgtataaatgtgccatgttggcatgctgcaccagttaactcatcatttacattaggtatatctcctaatgctatccctcccagctcccatcaccccacgacaggctccagtgtgtgatgttccccaccctgtgtccaagtgttctcattcttcaattcccacctataagtgagaacatgtggtgtttggttttctgtccttctgatagtttgctcagaatggtttccagcttcatccatgtccctataaaggacatgaacgtgtccttttttatggctgcatagtattccatggtgtatatgtgccacattttcttaatccagtctatcattgatggacatctggattggctccaagtctttgctgttgtgaatagtgccgcaatacacatatgtgtgcatgtgtctttataccagcatgatttataatcctttgggtatatacccagtaatgggatgacttggtcaaatggtagttctagttctagatccttgaggaatcgccacactgtcttccacaatggttgaactagtttacactcccaccaacaccgaaaagtgttcctaattctccacatcctctccagcacctgttgtttcctgatattattattattatattttaaattccatggtacatgtgcacaacgtgcaggtttgttacatatgtatacatgtgccatgttggcatgctgcacccattaactcgtcatttacattaggtacatctcctaatgctatgcctcgacactcccccctccccatgacaggccacggtgtgtgacatcccccatcctgtgtccaagtgttcacattgttcaattcccacctatgagtgagaacatgtggtgtttggttttctgtccttgcaacagtttgctgagaatgatgtttccagcttcatccatgtccctacaaatgacatgaactcatccttttttatggctgcagagtattccatggtgtatatgtgccacattttcttaatccagtctatcattgatggacatatgggttggttccaagtctttgctattgtgaatagtgccacaataaacatatgtgtgcatgtgtctttataccagcatgatttataatcctttgggtatatacccagtaatgggatggctgggtcaaatggtaattgaggaatcgcaacactgtcttctgcaatggttgaactagtttacactcccaccaatagtgtaaaagtgttcctatttctccacatcctctccagcacctgtcttttcctgactttttaatgattgccattctaactggtgtgagatggtatctcattgtggttttgatttgcatttctctggtggccagtgatgatgagcattttttcatgtgtctgttggctgcataaatgtcttcttctgaaaagtgtctgttcatgtccttcacccactttttgatggggttgattttttttcttgtaaatttaagttctttgtagattctggatattagccctttgtcagatgagtagattgtaaaaattttctcccattctgtaagctgcctgttcactctgatggtgttttcttttgctgtgcagaagctctttagtttaattagatcccatttgtcaattttggcttttgttgctattgcttttggtgttttggtcatgaagtccttgcccatgcccatgtcctgaatggtattacctaggtttttctctagggtttttatggttttacgtctaacatttaagtctttaatccatcttgaattatttgttgtataaggtgtaaggaagggatccagtttcagctttctacatatggctagccagttttcccagcaccatttattaaatagggaatgctttccctacttcttgttttcatcaggtttgtcaaagatcagacgcttgtgatgtgtggtattatttctgaaggctctgttctgttccattggtctatatctctgttttggtactagtaccttgttgttttggttactgtagccttgtagtatagtttgatgtcaggtagcatgatgcctccagctttgttcttttggcttaggattgtcttggcaatgtgggctctattttggttccatatgaactttaaagtagttttttccaattctgtgcagaaagtcattggtagcttgatgggtatggcattgaatctataaattactttgggcagtatggccattttcacgatattgattcttcctatccatgagcctagaatgttcttccatttgtttgtgtcctcttttatttcattgagcagtggtttgtagttttccttgaagaggtccttcacatcccctgtaagttggattcctaggtattttattccctttgaagcaattgtgaatgagatttcactcatgatttggctgttcgtctgttaatggtgtataggaatgcttgtgatttctgtacattagtatcctgagactctgctgaagttgcttatcagcttaaggagattttgggctgagaccaatatacaatcatgtcatctgcaaacagggacaatttgacttccttgtttcctatttgaatacacattatttctttctcttgcctgattgcccaggccagaaattccaacactaagctgaataagagtggtgagagagggcattcctgtcttgtgccagttttcaaagggaatgcttccagtttttgcccattcagtatgatattggctgtgggtttgtcacaaatagctcttattttgagatacgtcccatcaatacctagttgattgagagtttttagcatgaagggctgttgaattttgtcaaaagtcttttctgcatgtattgagataatcatgtggtttttgtctttggttctgtttatatgatggattacatttattgatttacatatgatgaaccagccttgcatcccagggatgaaactaacttgatcgtggtggataagctttttgatgtgctgctggattcgtttagccagtattttattgaggatttttgcatcgatgttcatcagggataatggtctaaattcttttttgttgtgtctgtcaggctttggtatcaggatgctgctgacctcataaaatgagttagggaggattccctctttttctattgattggaacagtttcagaaggaatggtaccagctcctctttgtacctctggtagaattcagctgtgaatccatctggtcctggacttttttttattggtaggctattaattattgcctcaatttcagagccagttattagtctactcagggattcaacttcttcctggtttagtcttgggagggtgcatgtgtccaggaatttatccatttcttctagattttctagtttatttgtgtagaggtgttcatagtattctctgatggtagtttgtatttctgtgggatctgtggtgatatcgcctttatcatcttttattgcatctactctcttttcttattagtcttgctagcggtctatcaattttgttgatcttttcaaaaaaccagctcctggattcattgatttttttaaagggttttttgtgtctctatctcctttaattctgctctgatcttagttctttcttgacttctgctaacttttgaatgtgtttgctcttttttttttttttgagatggagtctcgctctgtcgccaaggttggagtgcagtggcacaatctcagctcactacaagctccacctcctgggttcacaccattgtcctgcctcagcctcccaagtagctgggaatacaggcgcctgccaccacgtatggctaatttttttttttttttgtatttttagtagagacggggtttcaccgtcttagccaggatggtctcgatctcctgatctcatgatctgcctgcttcggcctcccaaagtgctgggattacaggcatgagccactgcgcccggccgcttctctagttcttttaattgtgacattagggtgtcaattttagatctttcctgctttctcttgtgggcatttagttctataaatttccctctacacactgctttaaatgtgacccagagattctggtctgctgtgtctttgttctcgtttgtttcaaagaacatctttatttctgcctaaattttgttatgtacccagcagtcattcaggagcaggttgttcagtttccatgtagttgagcagttttaagtgagtttcttaatcctgagttctagtttgattgcactgtggtctgagagacagtttgttataatttctattcttttacatttgctgaggagtgctttacttccaactatgtggtcagttttggaataagtgtgacgtagtgttgagaagaatgtatattccgttgatttggggcggagagttctgtagatgtctattaggtatgcttggtggagagctgagttcaattcctggatatccttgttaactttctgtctcattgatctgtctaatgtcaacaggggggtgttaaagactcccattattgtgtgggagtctaagtctctttgtaggtctctaaggacttgctttatgaatatgggtgctcctgtattgggtgcatatatatttatgatagttagctcttctaattgcattgatccctttaccattatgtaatggccttctttgtctctattgctctttgttggtttaaagtctgtttcatcagagactaggattgcaacccctgctttttttgtttgttttccatttgcttggtagatcttcctccatccctttattttgagcctatgtgtgtctctgcaggtgagatgggtctcctgaatacagcacactgatgggtcttgactctttatccaatctgccagtctgtgtcttttaattggggcatttatcccatttacatttaaggttaatattgtaatttgatcctgtcattatgatgttagctggttattttgctggttagttgatgcagtttctgcctagcattgatggtctttacaattcggcatgtttttgcagtggctgataccggttgttcctttccatgtttagtgcttcattcaggagctcttgtaaggcaggcctggtagcgacaaaatctctcagcatttgtttgtctgtaaaggattttatttctccttcacttatgaagcttagcttggctggatatgaaattctgggctgaaaattcttttgagaatgttcagtcaggcgcggtggctcaagcgtgtaatcccagcactatggaaggctgaggtgggtggatcatgaggtcaagagattgagaccatcctggctaacacagtgaaaccccatctctactaaaaatacaaaaaattagctgggcatggtggtgggcgcctgtagtcccacctactcaggaggctgaggcagaagaatggcatgaacccgggaggcggatcttgcagtgagccgagatcgcaccactgcactccagcctgggcaacagagcaagattccgtctcaaaaaaaaaaaaaaaaaaaaatagaatgttgaatattggcccccagtctcttctggcttgtagagtttctgccgagagatccactgttagtctgatgggcttccctttgtgggtaagctgacctttctctctggctgcccttaacattttttcctctatttcaactttggcgaacccgacaattatttgtcttggagttgctcttcttgaggagtatctttctggtgttctctgtatttcctgaatttgaatgttggcctgccttgctaggttggggaagttctcctggataatatcctgaagagtgctttccaacttggttccattctctccgtcactttcaggtacaccaatcagacgtagatttggtcttttcacatagtccttatttcttggaggctttgttcatttctttttactcttttttctctaaatttctcacttcatttcattcatttgatctttgatcactgatactttcttctacttgatcaaatcagctactgaagcttgtgcatgtgtcagtcacgtagttctcttgccatggttttcagctccatcaggtcatttaaggtcttctctatgctgtttattctagttagccatttgtctaatcttttttcaaggtttttagcttctttgtgatgggttgaaacatcctcctttagctcaaagtttattactacccatcgtctgaagtcttcttctctcaactcgtgaaagtcattctccatccaactttgttccgttgctggcaaggagctgctttcctttggaggagaagaggcactgtggtttttagaattttcagcttttctgctctggtttctccccatctttgtgggttttatctacctttggtctttgatgatggtgacgtacagatggggttttggtgtggatgtcctttctgtttgttagttttccttctaatagtcaggaccctcagctgcaggtctgttggagtttgcctgggtatcaccagcggaggctgcagaacagcaaatattgcagaatagcaaacgttgctgcctgatccttcctctggaagcttcgtctcagaggggcacccggccatataagctgtcagtcagtccctactgggaggtgttgcctagttaggctacttgggggtcaaggacccacttgaggaggcagtctgtccattctcagatctcaaactctgtgctgggagaaccactactctcttcaaagctgtcagacagggacgtttaagtctgcagaagtttctgctgccttttttttggctatgccttggccccagaggtgggagtctacagaggcaggcaggcctccttgagctgcaataggctccacccagtttgagcttcccagccactttacgtactgaagcctcagcaacgacggatgccccttccccagcctcactacagccttgcagtttgatctgacttctgtgctagcagtgagcgaggcttcgtgggcacaggaccctccaagccatacgtgggatataatctcctggtgtgccatttgctaagaccattggaaaagcacagtattagggtaggagtgtcccaattttccacataccatctgtcatggcttcccttggctaggaaagggaattccccaaccccttgcgcttcctgggtgaggtgatgccccgccctgcttcggctcactctccgtgggctgcacccactgtccaacaagccccagtgagatgaacccagtacctcagttggaaatgcagaaaatcacccgtcttctgtgtcactcaagctgggagctgtagactggagctgttcctatttggccatcttggaacctcccttaaatccagagtcatctattttaactgcacacttgggaataaaagacatcttgggctataggccaagagctttcagagaagatagcttacaaaatgtggggcgactgggtatagaaacatttacccctatgccttaaggagtaaataattctttcactgctaattccaactattaacttggaactacagaaatataacatttcattgcaccacaaaacatcttgttatttctattttagattcagggaatacacctgcagattggtagcataggtatactgcatggtgttgaagtctggacacttttaactatcccattgcccaagcagtgtacactacacatggtaagtagtttttcagtgtttgtctccctttcttcttccatctttttggaattcccagtgtttactgttttcatctttgtttccatgtgcacccagtgtttacctcccacataaaagtgagaacatgtggtatttgttttactgatctctgttaatttgcttacattaatggccttctgctgcattcatgttgccacaaaggacaatatttcattcttttctgtgactgcatagtattgcagtctgtaagtacctcatttttcttatgcaatctaagatttataggcacccatttctcctgaagtcaggatgaagttgaaacagctgtttctccacaacttcaacatgtaattttttgacttataacagccattctaactggtgtgaaatggtatcatattgtcattttgatttacatctctgatgattacagatgttaagcattttttgaatgtttattggcaactcttatgtcttcctttgagaagtgtcaatattttctgctttgtcaaattaaatttcttatagattcgatatattaatcagttgtatgcactttgcaaatattttatttcatattgtaaggtgtctgtttcctttgttgatagtttctttggctgtgcagaagctctttagtttaattagatgcaaatttttgatttttattgttgttgcacttttaagatgttattcataaattcattccagaggccagtgtctagaacagtcctttctaaatgttcttctaggatttgtgtagcttgaagactcacagataagtccttaatctatcttgacttgcattttctatatggaaagaggtaggagtccacttttttctgcacataaccagttttccctgtaccatttattattattattacttttgaaacaaagtctcactctgtcacccaggctggagtgcagtggcgccatcttggctcactgcaatctccccctcccaggttcaagtgattcttctgcctcagcctcctgagtagctgggactacaggtgcctgctaccacgcctggctaatttttgtatttttagtagacagggtttcaccctgttggccaggctggcctagaactcctgacctcgtggtccaccagcctcagcctcccaaagttctgggattacaggtgtgagtcactgcatccagcccccacttattaaatagagagttattttccctttgttaatttctgtgggctttgtgaaaattaacttggttgtaaaagtgtagatttcagggctttctcttctccattgatctaaatgtatattttcataccagaaccatgtaatactggttactgtagcttgtagtacaattttaaatcaggtaataggaggcctctggtttttgtttttttttttttttctgacgttgccttgactatttgggcttttattctttcacataaattagttttctttgctgggcgcggtggctcatgcctgaaatcccagcactttgggaggccgaggctggcggatcacgaggagtttgagaccagcctggccaacatggtgaaactctgtctctacaaaaatacaaaaattagccaggcatgatggcgggtgcctacaatccccgctatttgggaggctgaggcagaactgcttgaacctggaagatgtaggttgcagtgagcccagattgtgacactgtactccagcctgggtgacagtgaggctctgtcttaaaaaataataatttaatatggttcacttaccataaactctctaaaattctaatttctatattttctaggaaattttatatttgtcacactttggataagaatctagtaagactctaacaatattttttctttttacaaagaaagcagcacaacactaactgatttaatcctctcacctgtggacatgtatgccttttatcttaattaactgatctgaaagttatattgataagcaaactctccagttaaaaccattttttcagttcattaaaaaataccaaacttctcatcaaaacccacaaaataccatgtgagatgacatggcatgaaaaaaacagtgggataactgcagccagtaacacagaaaaagaagaagggctatgatgtatacgtgggtggaatacacataaaaagacaaagcttaagataattagaaaataaatgaagcagaatttctttttaaattcagtaaaattcagctttgcagcctgaaaaaaaataaaatgtcctctccacatgaagaatcaatgttatttgtttacctttgatattttccacctgacttgcagtttgcaactttcacagaagtatttatgccttattatggagcatctgttatacagcaagcactgtcatgtttgtttgctacatttatgtataaaaacattctcatgacttatgaagtttccctagtacttacctgaacaaattgcctaacgaataaatttacttatatccatcacaaaaagtgaaaaaaaaataacataagaaaagtaggcttatatagggttctccaattaaatgaaatgttctaactaaataaaatataatttaatgcactaattttagaattacagctaaaaattattttgtgtacatgactaagtttattttattttgaagtggagtcttgctctgtcacccaggctggagtgcagtggcacaatcttggctcactgtgacctctgtctcccgggttaaagctattctcctgcctcagcctcccagtagctgggattacaggagcatgccaccatgcctggctaatttttgttatttttggtagagatgaggtttcaccatgttggccaggttgatcttgaactcctgacctcaagtgatccacccacctcggcctcccaaagtgttgggattacaggtgtgagccactgcacccagcccataactaaatttcattaaaatcattcttataatcacagagcagctcacaaaatgaatacctcataaactataaaacaacaaatatatatcagaaacaagaaatttatgggcctagcatgagtaccagacaagtgaaaacaagagaatttgaatggcaagattctgaaccataagccgtaaaattatacagtaaaattcaatacaaaccagagtatagatttgcattcatttttgaggatttttgttttctagaaaagtagacacctgaccaggtgtagtggctcacgcctgtaatcctagtactttggaagattgaggcgggtggatcacctgaggtcaggagttcaagactagcctgaccaaaatgatgaaaccccatctgtactaaaaatacaaaaattatctgggcatggtggcctgcgcctgtagtccttcctactagggaggctgaaacaggagaactgcttgaacccaggaggcagagttacagtgagcggaggtcacgccactgcactccagcctaggcaacagagtgagattctgtctcaaaaaaaaagaaaagaaaagaaaaagaaaagaaaattagacaccttattaaaatgatgtcttgttccaatattattctgaaaatagttacaaactcatactcaaacacacttaatccataatcttcttacacctaaggtttatatttagactaatagatgtgtacatttaactctatgtaaatcaaaactaaaagcctgtatctgtttgcaagcagagaggccacatattcaaagaaaaatatacaagaaattatttttaagtatttattcaggactcagaaatgtgtaaattttatacgtctatataatttttattattataaaaataaccctgtagtcaataataatcgtatattttaaaaaaactaaaactgtacaattgaactgttcataatacaaaaaataaatactaaaggtgatggatacctcatttaccctaatgtgattattatatattgtatgcctcttatcagaatatgccatatataacataaatattatgtgcctgaaaaaactaacaaaagtaaatttaaatgggaaaaaataaataaaagttttacctacagaaacaacattccttatttgcagtttaaagccactggaaaaaagattagtactacagatgttagtgcattcttttaccaaatagtgtattgttaccaccatttattttatttacttatttattttttgagagggagtctcactttgtcacccaggatggagtgccatggcatgatctcggctcaccgcaacctctgcctcctgggttcaagtgattctcctgcctcagcctcccgagtagctgggattacaggcatgcgccaccatgcctggctaattttgtatttttagtagagatggcgtttctccatgtgggtcaggctggtcttgaactcctgacctcaggtgatccgcccgcctttgcctcccaaagtgctgggattacaggcgtgagccaccgcgcctggccttgctaccaccttttacctacacccttgagtaaggtggactaggttaaagtaagtggaataatgtgacttgattgaatgcacaatatttaaactgtttaaaatgttgaattaagaaattaagttcacacataatctaaaatttttaacatactgcctttttttcataaaagtacaattagtaaaataatatactaatttatttttaattttaactaaaacaaaatttgtctctcaatataatgcagaatattactcggaacacctacctcatgcatcactcagtactgtaagtgaatcacaaagaacctctttacttagattttcatcatgcattttaatgtccttactctttcatagaagaggtcataaatgctcacctaataaaaaataatctctcatatcttttggtcacatgctttcacatatgaatacaataggaataaagaaacaacatcagccaggagcagtggctaacacctgtaattccagcattgtgggaggccaagctgggcggatcacctaaagtctcgagttctagaccagcctggccaacatggcaaaaccctggctccattaaaaatacaaaatttagccaggcatggtggtttgtgcctgtaatcccagctacttgggaggctgaggcaggagaatcacttgaaacctggagatggaggttgcagtgagctgagatcgtgccactgtactccagcctgggtgggcgacagagcaagactccatctaaaaaaaaagaaaaagaaaaaagaaaaagaaaaactaatttctttagcatgaagtaatttgagagttaattacaacattaacatgaagtaatttgagttaattacattatttgtatgaagtaatttgacagttatttacttttaaaaaaatctgtaatctttctaaaaaaaagtatacttgtaactctccaaagaatcttctactcttttaaagttataaacaaataatttttctaccaagtttagttttggattattttctaaactcagaactctgattcagtgtaaagtctgaagtgtcattgccttatatatttctaatgtaaattctctgatatttacatagacttaccattgaattaaattttttttctatttactgtatatgcaaaaatattttaatatgaactctggaattttctaacctgtagtttttgaataaatgtttttttctaaatttattacatttacagggtttttctttgatataaattctctgatgttgaacaaagtttgagcaattgcctcagggtttgctctaatacagaatgaatacaacaagatctgtgttacaagtaaagttaccacaacttcgtttatatttgtaatgtttgtcttcaaaataaatcctcttcagcactttaaatgcttatattttctgaactcttttgacagtaattgcacctttaatgctattaagtataaattctctgatgctgaataagatgtgtgcagatattaatcacttttttactttctttatatttgtacatttgttctcatcaagtataaaggctttcctgtgcaataaggtttgagcattgtgtaagttttgccacactgttcacacttgtagaagttttctccagaatgaattaccttacctacaatccagtgtgataaccatttaaaggctttgtcacattcatatttctattatttctcaccagcacaatttcttttatatttggaaatctttgcaatgttgtcacaagcattgttacaactttcaggtttgtagagtttctctccagtatgaatcatcttatgtctgttaagaatagaggagttgttaaaggctttgccgcattcttcacacttgtagggtttctctccagtatgaatcatcttatgtgtagtaaggtgtgaggactggttaaaagctttgccacattcttcacatttgtagggcttctctccagtatgaattaccttatgtttagaaagagttgaggactggttaaaagctttgccacattcttcacatttgtagggtttctctccagtatgaattatcttatgtgtagtaagttgtgatgataggttaaaagctttgccacattcttcacatttgtagggcttctctccagtatgaattctcttatgtgtagtaaggtgtgagaaccggctaaaggctttgctacatacttcacatttgtagaatttctctccagcatgaattctcttatgtgtagtaagggttgaggattgtttaaaagctttgccacattcttcacacttgtagggtttctctccagaatgaattctcttatgtgtagtaaggtgggataaccggctaaaggccttaccacattcttcacatttgtagaatttctctccagtatgaattatcttatgtgtagtaagggttgaggactggctaaaagctttgccacattcttcacatttgtaaggtttctctccagcatgaattatcttatgtgcagtaagggttgaggactggctaaaagctctgccacattcttcacatttgtagggtttctctccagtatgaattctcttatgtgtagtaaggtttgcagattggttaaaagctttgccacactcctcacatttgtagggtttctttccagtatgaattatcttatgtgtagtaaggtgtgagagccggttaaaggcttttccacactcttcgcatttgtagggtttctttccagtatgaattcttttatgtgtagaaaggtttgaggcctcattataggctttcccacattctttacatttgtagggtttctctccactatgaattcttttatgttgagctaagtgtgaaagcatgcaaaatgacttttcacattctttacacttgaaagatttctttccagtatgtcctatcttatgtctgtttgaatttgaaaatttatgaaagactttcacatatttgtcatattgaaatattttgttctgggtagttgtcaaacactggttaagtccattgtaacattctttgtgcaccttacactcatccatgcttttacagtattttcttaactgtaaattttcacgtccacattttttatatgttctcagtatcactttttggaaataattttttttgccctgctttggccaaaggtcttgggcaaaataagaatatacaactgaaagaaataaaaataataaattacttcacttactagactcagatgaatgtactttacaaatctaacctataaaattatacaaactacatcacaagatgttacagcaaaatattacacgctctaacattttcacagacatataaaagcatacagaacaaattacatttctgaaaaattaaagtaagttaagtgtgtgcagtgccccagatgagcccaatgcaaagagccacacagaagaaagaaaagtctgttacatttacccagtgcagatcttcctgcttccctatataacatagtgactttagaaataaattgccaactcctggtttcattttcaaaagacaagtaaaataatggcttatacatctttatttctcaatggcaaggtcttttacactggttcctgtgtctcattgcataaaagttctgaaagaaatagtggtattctttcaaatgacagtttgaggctgctgagatgaaaggtaaggtaccaaaacagatatatagaccaatggaacagaatagagacctcagaaataacaccacacatctacaactatctgatctttgacaaacctgacaaaacacaagaaatggggaaaggattccctatttaataaatggtactgggaaaactggctagccatatgtagaaagctgaaactggatcccttccttacaccttatacaaaaattaattcaaaatggattaaagacttaaatattagacctaaaaccataaaaaccctagaggaaaacctagacaataccattcaggacacaggtatgggcaaggacttcatgactaaaacaccaaaagcaatggcaacaaaagccaaaattgacaaatgggatctaattaaactaaagagcttctgtacagctaaagaaactaccaccagaatgaacaggcaacctacagaatgggagaaaatctatgcaatctacccatctgacaaagggcaaacatccagaatctacaaagaacttaaacaaatttacaagaaaaaaactaacaaccccatcaaaaagtgagcaaaggatgtgaacagacacttctcaaaagaagacatttatgcagccaacagacacatggaaaaatgctcatcatcactggccatccgagaaatgcaaatcaaaaccacaatgagataccatctcatgccagttagaatggtgatcattaaaaagtcaggagacaacaggtgctggagaggatgtggagaaatagaaacgcttttacactgttggtgggactgtaaactagttcaaccattgtggaagacagtgttgcgattcctcaaggatctagaactagaaataccatttgagccagccatcccattacggggtatatacccaaaggattataaatcatgctactataaggacacatgcacacgtacatttattgcggcactattcacaatagcaaagacttggaaccaacccaaatgtccatcaatgatagaatggattaagaaaatgtggcacgtatatactacagaatactatgtattcatgaaaaaggatgagttcatgtcctttgcaggcacatggatgaagctggaaaccatcattctgagcacactatcacaaggacagaaaaccaaacaccgcatgttctcactcataggtgggaattgagcaatgagaatacctggacacagggcggggaacatcatacaacggggcctgttggggtgtgaggggctgggggaaggacagcattaaccaccatggcacatgtatacctatgtaacataactgcacgctgggcacatgtaccctaggacttaaagtataatgaaataaataaataaataagaaaggtaagttttacagcagcagaaagactgtggtactacagacaggaaacaattatagcaagtgattattggttattaaggagtttggtggctcaaacctgtaatcctagcactttgggaggccaaggtgggaggatcaactgaggtccggagtttgagaccaagccttggcaacatagtgaaaccctgtctctactaaaaatacaaaagtagctgagcatggggtcacatgcctgtaatcccagctaagtgggaagctgagaccagataatcacttgaaccggagaagtggaggctgcagtgggctgagaccatgccattgcactgcagcctgggtgacaggagcaaaactctgtttcaaaaagaaaaaaaaaaaaaaaaaaagaaaagaaacacgaataaactccgctgactaaaaactaaacacaaaattttagacaaggcacatcctaagaacatgtttgagagactcccagaatctctagccaagataattgttttcagactatgtcagaaaaaaaaaacattttaaagactgtgacaggtagcttttttgatgtccaaatctcattccagattacaatgtatacaaaacagggcaatataatttcatcaaaaataccatataaacttcagaaagaaaccataaaaaagatgtacacgttttaaacactaataagttgaataatatccaatgagtgaaacaggaacacagtccactgtagaaaatcacaaaaatgagaataaaaacaagaatatcaaaatattaaaaaaaaacaatttggtggtaaaaaatagaaaaataaacaactggaaaatcctaaaagaaaaatgatgtaaaaatgaagttcaacaaacaaattaggatacacacacagatatttaaacaaatacatattaagcacattttcaaaaatcacagacaggaagaaagtcttaggagcagcaaggtaaaagtaatgtgtcatttacaaacatagtcttatgatataaccagtgaattatcaacaaaaattttgcagatcagaaagataccgtgtgacacaaagtcctgaggggggggaaaaaaaaaagctatcaagttgagaataataccatcaacaaatctgtcctgccacataaaaagaaaaaaccttccaaaacaaccaaattctgaaaaagtatattagcactgcatatgccctacatataaaagatgatgaaagcagtttcttaaactgaaagtaaaagtattaaaaaaaaacacataatcatataaaaatacattattttccaggaaagatatgcacatacataaaaacagaatcttgtggcattatcataatggtgcagaaaacattttaaattatctctaaattttgaaaaataaaagcacagaaattataaacatctgttaatgaatatacaatgtaaaaacataattagcaacatcaaagacaaatttcagggcagatgtaatgaggaagatttttttattcaactgagatttattttataccaaattaaaactatactgttgtttcttatagaagttttatggaacccccaaggtgccaccaaaaaaaaattctgtacaaatatacaaaagtgaattagaaataagtaaaagcatatcaatacaaaaatcaaaaagacacaaagagagaaaatgagaaacaaagatgcaagaatcaaataaaataattaaaaatgtaacagtctgtctttatcagacagttatttaaatgtatatataaaattaacttttaaatcaagagacatactttcaacagattaaaaattttaaaaaccaagatccaactttttttttctacaagagtcagtagagatctaatgataaaaaacactaaaaggggcaagatggaagaatacatttcatgcaaatatgaatcaaatgagagcagaagaaatcaagatagtattatgcaagctacatcttaagtcaaaaactgtcatgttttacaaaatgtacttgaagttaaaactccaaggagacaaaaaaggacattaaaacttacagatttaggctgggcatggtggctcacgcctgtaatcccagcactttgggaggctgaggcaggtggatcacttgaggtcaggagttcgagactggcctggccaacatggtgaaaccgactctactaaaaatacaaaaattagccgggcatggtggtgggcgcctgtaatcctagctactcaggaggctgaggaaggagaatcacttgaacctaggaggcagaggttgcagtgagccgagatcacaccactgcactccagcctgggacacagagtgagactctgtctcaaaaaaaaacaacaaaaaaaaaccacttcagatttactcactgggaacctatgacaaatctgtatgtacatctgtgtgtgtgtgtgtgtgtttttgtgtgtgtgtgtgtgtgtgtgtatctcacattagggctccaaacatataaagcaaacattgacagaataacagagacacatagagagcaacataattatagtaggatattttgacactgcacttgccgtaataaaaattaaatgagaatattagtaagggaatagaggacttccaggcagtgtaagacaattatttctaacagaggtatagaaaacacccctcaacaccaggacacacatggttctcaatagctaatacaacattttccttcatagacctcctcttattacaaaaaaaagaaaattaagtcttaccagtttttttaaaactgaaattttataaattactttctatcaccaaaatgaaatgagtatacaacgagaaaaaaaatctgaaaaattaacaaatatatagaaattaaacaacacactcttgagcatgctcttgtgaaaggctgaaaaaggtaatactgtaaagatgtccatcctgctcaatgcaatctacagatttaatgcaatgtttttcaaatttctcactgcatttttgaagaaacagaaacagcaatccctcgagtatacagaatctctacatacaatgaagtacccaaaaatattaaaaacaaaacaaaacaatgttggaggcattacagttcctgatttcaaaacacaaagctacagaattaaaacaatttggtatgagtataaaggtgaaaaagtagactaataaaatagaatgcagcacatatataaactctcacatatatggtcacatgaagagtcatttgcatacccacatttattttagcattgttactaaaagccagtaggtaaaagcaaggcaaatttcggtcaccaaatcgttcagcagatataatttgaaatacaaaaatgccaaaatattactcagtttgaaaaaaagcaggaaatattctaacaactataaaggtaaatcctgatgactttatgcaaaataaaatgagccagccacaaacagattttatgagatatacaaagcagttatactcttagaaacagaaaacagaatggcatttgaaaagtgccaggaaatgggaaaaattggtagttgtttaatgtgtattgtaaactttctagaaatcttttataaaataatgtaaatatacttaacatgcctgaaatgtacagtgtttttgagtcagggtctcactctgtcacccaagctggggtgcatggcacaattacagctcactgcagcctcaaacttccaggttcaagtaatcctccctcctcaatctcccaagtagacaggaccacttcaccatgtctggctacgttttaaaatgctttacagagatgaggtttccatatgtcttccaggatgttctcaagcttttgggctcagtcttcctgccttggcctcccaaaatccggggattacagacgtgaaccaccacgactggccatgaaatgtacattcaaatagatttaagatggtaaattttaggttatatgtttgtacaattgttttttagaagaataactgaagatccagaattataaacctttccaaaaattaccttcaagtcacaaaagtgtttccctcacacataggaaatatgtttattattaaacacaaggtgaaaataagactatttccatgactactcatttagacaagataaagccaccattaaaaatcagctaagaaaaaatatatacaagattagccataaccaaaattggggtcatatttatagataaaaacacacacacatataatcagattgtaatagagataaggctgatttatctcttaaaccccacaccgacttacatgtaaaaacagaattgcaaattgtctaaaattgtaaaaccaaaaaacacaataaacttatgttaagaaacctacactgaaaaaacgcattaatatgaaactaaaaaataataataaatgtttactcataaaatctggtatgtaacttgatgtagcattaacaaagaatttgtgtagataactggaatattttactgtaactgtgtactcattgaaggtggctattttgaatcattggcatgcactgtaatgcagtaaaagtttcagataaaatgcagtataatcataaacagaagactctaatgacaaactgataaataagcattttaataaataagatcatttctaagttttaaatatatgctattcttacacaaaataaaactgctgtaatccaaatttagaagcaaaaaatagccttacattgctaaataaagaaaaaatatatctattttgcagaatatggtcagggcctctgatatataaaacaaatatttgggaacaaattatgtcatattttaggtactagctgacaaaagtgagtgaaaatcctgtctttttttgcctgtctatatttcctttttgtctgtctactaattatctaattcacctcagacataacatgtcaattttagtatattgtcctaaatgtctaaatctaaaactactgacaaaattgaaatagaaagtagaaagtaaaaatgtacaggaagagtgacatcactaagatggaaaaataaatggtgccttatttgcttattttctgacagcaagaaaattcatcagcctgataaaaatgcctttatgagagaaacaggaatcatgactcaaacctgtaatgagaaatgctttaggacagaacttcaagatcaacctgggtcatgtagcaagaacccatctccaaaacaagtgcccttaaagagctttgagatctatggagggagttgtgaaactctgctaatgcccaagattgaggaatattctcttcagaaggcaggctttcattcaggtggcaaactacaggacccctgttcttggctacagaccagaaaatggcccaccaaacttggtcccactgagaattctgaacttaccctgcaatcatcccaaactcctcccagccacagtctgggagaggtcttgccctttcagaggtctggagagagacacccctttatagccacgcagcaggcctgcagaccttggccattactgtggtccctgaagcagtttcatgactcagttttatcaccctgagccacagttcatggcaagttctgcctatgtagaaacccacacagtgaccttgggaaatcctctctggtactcagtgaaagccaaactcatctacatcctaatataaagcctaccatatgcagacccaagtgcagaaatctgccctagcgtctgccctacagagcaaagtcctgaaggatactcactctgtccaaaaataaaatgggaattacaactacctaagccccttgtaacaagccaactaaaggtggaccctaatgcagacccagcagcctttgtaaacaagctacctacccctctccactacaaacccataggacatcccatcaccctgggggctcaacaaaagatcttcactttctgaaaccaatttataaaaacttgaagagggccaggcgcggtggctcacgcctgtaatcccagaactttgggaggccaaggcgggtggatcaccaggtcaggagttcaagaccagcctggccaacatggtgaaaccccatctctactaaaaatataaaaattagccaggcatggtggcacgcacctgtagtcccagctactcgggaggcagaggcaggagaatcacttgaacctgggaggtggaggttgcagtgagccgaggccgcgccactgcactccagtctcagcgacagagtgagacactgtctcaaaaaacaaaacaaaacaaaacaaaaaaaaaacaagaaaaacttgaagaggtgtttactccttcaaactcacagacaccaatgcaaaagtttattatgcccattctcaatgcttctattttaacacagcactggaagtatgtggaataagtaaaaaaaaaaaaaaaaaaaatttaagtcactgaaattgaagacaaataagtaaaaagttgctttttgtagatcatttgatcttgtatatagaaaaccataaacagtacatttaaaacctaattaaagtaataattacactcaataagttagcaaaatagaaaattaacatacaagtgtaagttatggttccatacactttaaacaaactatctgacaaaagagagacagaaagcaatcttatttacaatagcactaaaataataaatttctgagaacaaatttaaccaaggagcttaaatatctttcaaataaaagatacatcaataattggagaagacaaaaataaatttaaaaacatttcatgtctattgattgaaagaatttttttttttttttgagatggagtttcactcttgttgcccacattggagtgtagtggtgcaatctcagctcactgcaacctctgcctaccaggttcaagcaattcttccgcctcagcctcccaagtagctggaattacaggcgcctgtcaccacgcctgactaattttttgtatttttagtagagacagggtttcatcatgttggccaggctggtctcaaactcctgacctcaggtgatccacctgcctcagcctcccaaagtgcagggattacaggcgtgagccaccatgcccggctgaaagaatattattaaagtgccgtgttatctacagtgatctctagattcaataaattccctatcaaaattccagtattttttttttacagtaatagaaaatacaattctcggtcaggcacggtgggtcacacctgtaatcctagcactttgggaggccaaggcaggcggatcacaaggtctaggagttcgagaccagcctggccaatatggtgacaccccgtctctactaaaaatataaaaattagccaggcatggtggctcgcgcctgtattcccagctactcaggaggctgaggcagaagaatcgcttgaacccaggaggcagagattgcagttagccaagatgatgacactccactccagcctgggtgacagagcaagactccatctcaaaaaaaaaaaaaaaaaaaagaaagagaaaaagaaaatacaattctcacatagacttacaataaactttgaatagccaaagcaatcttgaaaaaaaaaggacaaagcagaagaacatcatactttataatttcaaactatacttcaagactataataagacagaatgcaatgtgcagaaaaattagcaataaaaaaccaatggaacagaaaccactgctctcacacatttaggacatgatgtaaaaacagaacttgaaaaacagtttaacatagagtttctcaaaattatgcagattatctatgtgttttcaaaaacaatgaaaaagcagtcagatttcacagtctcttatgtgccatgaagagggctgtcttggctgtcactgtaaacctgaagaagatcaccaaagggaaagtaaaatctttagagattttaaaaatataagacagaagatgcttctatgtgaaagcaaaatttaaaaaattcaagtttcctagaaactatttcctttggaacacagatttcaaatcattttaaggaatggctttttttttttttctactttggagctctcatctgtgtcgtctgttgtattcactttcactctcacctacctgggggttcagttaccatctcatgtctcttcacattccaaggttcttttccttgctccagacaggtgatcaggtctggcttagaggcagcaatacctgttttattacaaataacatgaatcttgctcatattctccaattaccaatttagtagtgtgttcagtaaaaaggatgtaatagaatattctagtaaattgattccaaaatactaatacacaacaaaaaattttaaatatttaggaaatattttaattttgtaagttcttaatttcactacctgatactactaaatcaaaaactggtagtggcaattagattttaagatgtgggcaacagtatgttatgccactaaatttctaaaattaacactaatctagagtgaagaacacagatcagctcaggagtgtggaaagttcagatcaaaatgaaacatcttgaaattcttttctacatagacaaatcttgaagttaaaaaaaaaaaacaaaaaaaaaaaacagagatctgaaagcataaactaccaaaaaaaccattctacaaaaaagagaaataaaatttatagggtatattagggaattgtatattgaagttatcctcacccacaaagaccaggtttctgtagttctctaacatcacattcctatataaattctgctgtgcggtgtccaggcattgccactcctccagagagaattctaaggccacatccctaaatgtcaacactccctgaaaaacatacaaacacacatacatatttaccaagtggccataaacagaatttttaatttgactcaaggtaaaacaagagtaaagagaactggttcttacttataggagtgactgatatatttaataaataactttcagcacagaagtattctctaatgtattctctaactctgagaaaagagagtggcataagatccacaacatcgaggtatagatgatacttttttggatgatgaagtataaaactgagggcattaacactaacatgtacacttttgagtgctacatttacatcatacagaataagttgtgtaaatttttcagatggaaaagacatattcagttagaaaatactgctcacatgttaatgtgtaaaataaactggagatcttgttaatgcagattattttttcagaaaatctgggctgggagcgatggctcacgcctgtaatcccagcactttgggaggctaaggcaggtggatcacgaggtcaggagaccgagactatcctggctaacacagtgaaaccctggctctactaaaaatacaaaaaattagccaggcgtggaggcgagagcctgtagtcccagctactcgggaggctgaggcaggagaatggcatgaaccccagaggcggagcttgcagtgagctgaaatcgcgccactacactccagcctgggtgacagagcgagactccgtctcaaaataaaaaaaagaaaagaaaatttggaataaaatctgagtttctgaatctctaacaagctcaccagtaatgcccatgtttttggtccaagaaaactattttgtcaaacatccagtaagtggaagagcctgtgtgtttttcagtttttctggcctgtaaacaaagatgagagctttcgttttccaaagacagataaatgcaaagaaaacctaagaaaggtcagctgccagattaaatgtgattgtttatgcacatctgctgaataaagatactcaataatgaagagaaaaataatgaactctatagaaaaaaaaatctgtcagagttcattaaccaagtgagttattaacatcaactgcatgaagataaatttttatgatgtgctgatgcacacagaaggacacggcatcactgctatggtatctcccagccaaaagtaaatcatagcctgaatttaatcataaagaaacattggttttatgcaaagttccagatactgatatctgccatgttctgtaaattttaatagtgattttaagtagtctttctttcacaccctaaagagcaagtatctcctaataatttttttttcaaaactgtctgggtaataaatgccatcccatttaagcaagcattttcttaatcctgttctgcatagagttaatggagaacagagatagaacctcaacattacatgctctccatctttactacggactccagcttttccccaataggaatattcagtatccaccctttccatgttccacagccaggaaagaaaccttcttaatattgcagttcataaattcatggtgagaattctttatgacgtgtaagaagccatgatgttgagaatgtaaagaagactctggtatataggaaagaaatatttttcagacacccctgactattataagaactaaaaagcagttaaactcattaggaagaaaaagcacatgtagaaaagtaaagctttgcaagtactgaacatatggcattctaggacacagagtggacacagctcttcatctgagacatgcttagctaaaaaaaaaaaaaaaaaaaattaggggcagggcaaagatggccaactagaagcagctgcgatcagaggctcccaccaaaaagaaccataatggcctgtgaatcctgcacttgcacctgaggtatccaggttctctcatcagaactgactaggcagctggcatgacccacggagaggaagaaagagcagtgtggtgcagcaacccacctgagagccatacggggaaggggagcccccaccccccagccaagagagatggtgaatgaatgtgctacttagccgacaaaaccatgctttttccatggaactgtgcaacccacaaacggaaagatttcactcgtgaacccatgccacaggagcctagggtcccaaccccagagctgtgcagattctcaacaacctctcagctaaaatctgtttaagcctgctgagttcccaggggaggggtgaccagcaccacaggtgtggctgcctgctgtctaagccatctgagctccccggggaggggcagcaaccatctctacagctcctggcaggcttggttccaagaagtgtcccccacagcccaacacaccggctgtgccagactacagctacagcacctcttcaggcctgactctgacccatccctcctcattttgtggggccaccctgcaggaactccaactccagccaggggctcagggacagaactctgatctccctgggcctgagtccctaaggggagaagtgattgcagtctctgtgggaacagcagacttagcttttcctcctgttagttctaaggaatccaagcagcccagaggagtggttttaacttcagtgaagcataccccctccaccaagggacaataaaagtgcttcattaaatgggttctgttcctcgtgtcacccaatgggtgaaatactccaactggggttgtcagacactctatacaggagtgttcctactggcatcagattgttgttccttgaggtcaggcagcccagaggaaggagaaggcaaccatctttgctgttctccagcctccttgagtattatctccaggtgcaggagtgaaccacgtaaatagggcctgaagtgaacccccagcaaatcacagcaaccatacagaagagggacctgaccactgaaaaaaaacaaacagaaatgaacaacagcaataaaaaagtccccacactaacctcatccaagagtcagcagcctcaaagatcaaaactagacaaactcatgaagatgagaaagaattaatgaaaaaaacgctgaagccaggtgtggtggctcatgcctgtaatcccagcactttgggaggctgaggcgggcagatcatgaggtcaagaaatcgagaccatcctggctaacacggtgaaaccctgtctctactaaaaatacaaaaaattagccgggcatggtagtccgcacctgtagtcccagttacttgggaggccgaggcagaagaatgacgtgaacctgggaggcagagcttgcagtgagctgagatcgcgccactgcactccagcctgggcaacagagcaagactccgtctcaaaaaaaaaagaaaaaagaaaaagacactgaaaacccaaaaggcaagagtgcctcttctccaaatgattgcaatgcctctccagcaagggtgcagaactggatggagaataagatagacaaattgacagaagtaggcttcagaagatgggtgataacaaactccactgagctaaaggagcatgttctaaccaaatgcaaaaaacctaagaaccttgataaaaagttagagagaggagctgctaactagaataaccagttagacagagtctcactctgtcgcccaggctggagtgcagtggcgcgatcttggctcactgcaacctccgcctcctgggttcaagcgattctgctgtctcagcctctggagtagctgggattacaggcgcgtgccaccatgaccagctaatttttctacgtttagtagagatagggtttcatcttgttggccaggttggtttcgaactcttgacctcagatgatccccctgccttggcttcccaaagtgctgggattacaggcgtgagccactgtgcccagtcctattttgttaattttttcaaaaaacagctcctgaattcactgattttttttttttggagggtttttcatttctcggctgggcacggtggctcacgcctgtaatcccagcactttgggaggccaaggcgggtgaatcacaaggtcaggagttcaagaccagcctggccaacatggtgaaacactatctctactaaaaatccaaaatttagctgggtgtggtggctcacgcctgcagtctcagctactcaggaggctgaggcagaagaattgcttgaacccgggaggcggaggttgcagtgagccgagataatgccactatactccaacctggatgacagagtgagactctgtctcaaaaaaataaaaataaaagcaaaaacaaaacaaaactggcaaaccaaatccagcagcacatcaaaaaacatccaccaggtcgggcgcggtagctcacgcctgtaatccgccactttgggaggccgaggcgggcagatcacgtgagaacaggagttcgagaccagcctgaccaacatggagaaaccccgtctctactaaaagtacaaaaaattagccaggcgtggtggtgcatgcctataatcccagctactagagaggctgaggcaggagaatcacttgaacccaggaggcagaggttgcagtgagccgagatcacgccactgcactggacaacaagtgcgaaactctgtctcaaaacaaaacaaaacaaaaaaactgatccacaacaatcaagtcggcttcatccctgggatgcagggctggttcaacatatgcaaatcaataaacgtaattcatgacataaacagaactaaagacaaaaaccacatgattatctcaatagatgcagaaaaggcctttgataaaattcaactttctttcatgttaagaactctcaataaaccaggtgttgatggaacatatctcaaaatagtaagtgtgtttatgacaaacccacagtcaatgtcatattgaatgggaaaatgctggaagcattctctgaaaaccagtacaagacaaggatgccctttctcaccattcttattgaacatagtattgaaagttatggccagggcaatcaggtaagggaaagaaattaagagtattcaaataaaaaaacaggaagtcaaattgtctctgtttgcagatgacattattctatatttagaaaattctgtcatctcagcccaaaaactccgtaagctgataagtgacttcagcaaagtctcaggatacaaaatcaatgtgcaaaaatcacatgcattcctataagccaacaacagaccatcagagagccaaatcgtaaataaacatcacaattgctacaaaaagtaaaatatataaaaatacagctaacagggaatatgaaggacctcttcaaggaaaactacaaaccactcctcaaggaagtaagagagcacacaatcaaatggaaaaacatcccatccttatggatagaaggaatcaacatcatgaaaatggccatactgcccaaagtaatttatggactcaatgttattcccatcaaactaccattaacattcttcacagaattagaaaaaacaatgactttaaatttcatatggaaccaaaaaagagcccatatagccaagacaatcctaagcaaaaagaacaaagatagaggcatcacactacctgacttcaagctatactacaagactacaataaccaaaacaacatggtactggtccaaaaacagacatacagaccaatggagcagaaaagagacctcagaaataacaccacacatctacaaccatctgatattcaacaaacgtgacaaaaacaagcaatggggaaaggattttctgttcaataaatggtcctgagaaaaccggctagccatatgcagaaaactgaaactggacctcttccttacatcttatacaaaaatttactcaagatggattaaagacataaatgtaaagcccaaaaccagaaaaaccctagaagaaaacctaggcaataccactcaggacataggcatgggcaaagacttcatgacgaaaacgccaaaagcaattgcaacaaaagccaaaattgaagaataagatgtaattaaactaaagagattctacacagaaaaagaaactatcatgagagtgaaccagcaacctacagaataggagaaaatttttgcaatctacccatctcacaaaggtctaatatccagaatttacaagaaactttaaaaaatttacaagaaaaaaacaaacaattccatcaaaaactgggcaaaagctggaagtggtggctcacacctgtcatcccaccactttcggaggccgagatgggtagatcatttaaggccaggagttctagaccagcctggccaatatggtgagaccccgcctctactaaaaatacaataattagctgggcatggtagtggatgtctgtagtcccagctactcaggaggctgaggcagaagaatggcttgaacccaggaggtagaggttgcagtgagcagagattgcgccactgcactccagcctgggagacagaacgagactctatctcacaaaaaaaaaaaaaaaaaaaaaaaagtgggcaaaagatgaacaaacacttctaagaaggcatttatgcagccaacaaatatatgaaaagatgctcaataccactgatcattagagaaatacaaatcaaaaccacaatgagataccatctcacaccagtcagaatggtaattattaaaaagtcagaaacaatagatgctggtgaggctgtgaagaaacagaaacacttttacactgttagtgagaatgtattagttcaaccatcgtggaagacagtgtggtgattcctcaaggatctagaaccagaaatatcatttgacccagcaatcccattactgggtatatactcaaagaaatataaatcattctactataaagacacatgcacacgtatgtttactgtagcactaattacaatggcaaagacatggaaccaacccaaatgcccatcaatgacagacttgacaaataaaatatggtacatacacaccatggaatactatgcagccatacaaagaaatgagatcacgtcctttgcaggaacatggattaagctggaagtcatcatcctcagcaaactaacacagggatagaaaaccaaaaaccgcatgttctcattcataagtggtagttgaacaatgagaacacatggacacagggaggggaataacacaaaccagggcctgttgtgaagtgggggcaaggggagggcacctagaagggtcagtacatgcagcaaaccaccatgccacacatatacgtatgtaataaacctgcacattaactaagcactgcctctcaagctttaatgagcttataaatcacttggtaatgttggtctcactctatgtaatgtgattctgcaggtatggaaagggtccatgagtgggtgttttaaataagtcccgtcaaggctgatgttgctccccctaggctcattattagcattagttagagagcaggcacagcacagagtctcttacacttggcactcttgtcacaacacaattacttctgaaacaaatgacaaccaacctccatcttaaagtatcataatctttgttggctttttaaagtttacacagaaaacagaaagtagcaatatctgactgagtctgcatttatttttatttttatttttatttatttacttattgagtctcgctctgttgcccaggctagagtgcagtggcgagatctgcacttactgcaacctctgcctcccaggttcaagctgttcttctgtctcagccttccgagtagctggaactacaggcatgcgccaccatgcctggctaattttttttgtagagccaggatctcaccatgttggtcaggctggtctcaaactcctgacctcaaatgatctgcccatctcagactcccaaagcgctgggattataggtgtgagccaccgcacccagcccttgcttttgcattgtaagtacttcagcctgcaaataattaccttggataatcaagtttctgtcaaaggaacttactctgtatcttttagtctttatcattctgtattgttaaatttaattctacctttgtgtccaactttcatgtgctcttaaaatgagctttactctgaacaaatctgtgcgtacttttaatgaccgaaaattaaaaaaataaatctttgccaaagcaaaaacaaagctatgaatctcaggttacaaataaagacaattctgagtcaaaaagaatgataaaaggtttacttagctgttaatataatttacatatatttcaaaaaagcagagaaaaatatctacatataatctaaatgcgttaataaaacagagataaacaaaatatcctcccttattttcacatatgtgaataaagcctcttatttttaatttgcattttctcctaaaacaaccaggtcactggacatgttcttgaactcttggacatctgaattgtgaacttgaaagaatgtttatggtaaaaacgcagaagagagaaaggtgttataataaattgatgggtgcacacaaataaatcaagttgttagagaccgatgaagagaatgagatactgacacaataatagtgggagactacaacacccatgggcactaatagacacattattgaggcagaaaattaacaaagatattaagacctaaactcaacacctgactaaacagtcttaatagatttctacagaactctccatctaaaaagaacatagtatacagtcttctcatcattacgtggcacatactctaaaattgaccacacagtcagaagcaaaacaatcctcaacaaatttaaaaattccaaaattatatgaaccacacacagaggccacagcttgataaaaaagtaattcaatacaaagaaaatcacttgaattatacaagtacatggaaattaaacaacctgcacttgaattacttttgggtaaataatgaaattaaggcaagaaccaagaagttctttgaaaaaaatgagaacaaagatacaacatacctgaatttttgcaacacagctaaggcagtgttaggagaaaaatttatggcatgaaatgcttacattgaaaagttagacttcagtttaacaacctgacatcataagtaaaaggctgagagaagcaagagccaatcaacccctaagctagcagaagacaagaaataaccaaaatcatttctgaacggaaggagattttcacatgaaaaactatacaaaagatcaagaattgcaggagtaaaatcttaaaaaaaaaaaaaaagataaattctcaacaaaatattggcaaaccaaattgggcaggacatcaaaaacctaaccgactatgatcgagtagggtttatttttgggatgcaaggttaattcaacatacacgaggtggggcgcagtggctcacacctgtaatcccagcactttgggaggccgaggcgggagtatcacgaggtcaggagatcgagactatcctggctaacatggtgaaacctcgtctctactaaaaatacaaaaaaattagccaggcgtggtggcgggtgcctgtaatcccacctactcaggaggctgaggcaggaaaatggagtgaacccacgaggcggagcttgcagtgagccgagattgcaccactgcactccagcctgggtgacagagcgagactccgtctcaaaaaaataaaaaataaaaataaaaataaaaaaaaataataataatgagttatccatcacaaacccacagacaacatactgaatacacataacctggaatcatttttctttgaaaactgggacaagacaaggatgcccctcctctcaacactcctattcaacataaaactggaagtcctggccagagcaattaggcaagataaaaaaataaaaggcatacaaacaggaagagaggatgtcaaaacctatttctgtttacagatgacataatgccgtacctgaaaaaccctataatctcggcagaaaagcttttcaaactgacaacttcagtaaaatttcagaatacaaaataaatgtacaaaaattagtagcatccctgtaaatcaaaaacatgcacgccaaaagccaaatgaaaaacggaatccaattcacaatcactacaaaaagaataaaatatctaggactatagctaaccagggaggtcaaagatctttatgacaacactgtgaaaacactgcttaaggaagtcagagatgggccaggtgcggtggctcacacctgtaatcccagcactttgggaggccgagacaggcagatcacctgaggttgagagttcaagaccagcctgaacaacatggagaaaccccgtctctactaaaaacacaaaattagccagggtggtggcgcatgcctgtaatctcagctactcaggaggctgaggcaggagaatcgcttgaacccgggaggcagaggttgtggtgagcagagatggtgccattgcactccaacctgggcaaaaagagcaaaactccgtctcaaaaaaaaaaaaaaaaaaaaaaagtcagagatgacacaaacaaatggaaaaccattttatgctcatggatagaaaagatcaatattggccaggcaaagtggctcacacccataatcccaacactttgggaggctgaagcggctggatcacaaggtcaggagttcaagaccagcctgccaacatggtgaaaccctatctctactaaaaatacaaaaattagccgggcgtggtggcaggcatctgtaatctcagctactcgggaagctgaggcagagaactgcttgaacccgagaaggagaagttacagtgaaccaaaatcatgccactgcactctagcctgggtgaagagcaagactccatctcaaaaaaaaaaaaaaaaaaaaaaaagaaagcaagcaagaaagaaaagatcaatattattaaaatggtcatactgtcaaaaaattagatttgctatttttatcaaactaccaaaaacatttcttaacagaactaaaaaaacaaaacaaaacaaaaaaacttttaaaacttatatggtaccaagaaagggcccaaatagccaagccaatcataagcgaaaagaacaaagctgaagtcattacattacctgaattcaaactatactacagggtacagtaaacaaagcaacatggtactggtacaaaaacaaactcacagaccaatacaacagaatagagagcccataataataccacacacctacaaccatctggtctttggcaaagctaacaagaggaatctggaaagaattccctatttaacaaatgatactggaataactagctagcactatgtagaagattgaaactgaaccccttcattacaccatatacaaaaatcaactaaagataaattaaatatttaaatgtaaaacttcaaattatatatttaaaaagatccatgaaataccattctagacacagaagccggcaaaaattttaaaataaagataccagaagcaattgcaacaaaagtactaattgacaaatggaacctaattaagctaaaaagcttcttcacagcaaaggaaaccatcaacacagtaaacaaacaacacacagaataaaagaaaatatttgcaaactatgcttttgacaaaggtccaatatccataatttataagaaacttaaacaagtttacagaaaaaagaaaggcctcactaaatggtagacaaaaaacatgaaaaagatttttttttcaaagaagacacacatgtggctaacaagcatataaaaaatgctcatcactaatcattagagaaattcaaagaaaaaccataatgaaatatcatctcacaccagtgagaatggctagtattagtcaaaaggtaacagatgctggcaaggttacaggaatgcttataccagtgggagtgtaaattagttcattataaaaagcagtgtgacgattcctcacagaactaaaacagaattacctgttgacccagcaacctcaaaatcgggcatatacccagtaaaatacaaattattctattataaagacatacgcatgttcattgcagtactattcacaatagcaaagacatggaatcaacctaactgcttctcaactgtatactggataaagaaaatatggtatggctggccatgatggctcacacctgtaatctcagcactttgggaggccaaggcaggtaaactgcctgagctcaaaagtttgaggccacccagcggaacatggcaagaccccatctctacaaaaaatacaaaaaaaaaaaaaaaattagccaggtctggtggtgtgtgcctgcagtctcagctatgtggggggctaaagtaaaagaagattgcttgagcctgggaggttgaggctgcagtgagctgagatcatgccactgcactccagtctggacaacatagtgagaacctgtcttcaaaaataaaataaaataaaaggcttaggccaggcacagtggctcacgcctgtaatcccagcactttggtaggccaagacaggtggatcacaaggtcaggagttcgagaccagcttgaccaacatggtgaaaccccgttcctacttaaaaaaaaaaaaaaaaaaactacagacacacacacacacacacacacacacacacacacacacttagctgggcgtggtggcaggtgcctgtagtcccagctactcgggaggctgaggcaggagaacagcttgaacccgggaggcagaagttgcagtgagccaaaaccgtgtcactgcactccagcctgggcaacagagcaagactccgtctcaaaaaaacaaaacaaaacaaaaaaatttaagaaaaataaagtatgggccaggcgtggtggctcacacctgtaaccccagcactttgggaggccaaggcggacagatcatgaggtcaggagatcgagaccatctgggctaacacggtgaaaccccgtctctacgaaaaatacaaaaaattagccgggcgtggtggtgggcatctgtagtcccagctactggggaggctgaggcaggagaatggcgtgaacccgggaggcggagcttgcagtaaccgagatcgcgccactgcactccagcctgcgtgacagagcaagactccgtctcaacaacaacaacaaaaaagtatggtgtccgggtgcagtggctcacgcctgtaatcccagcactttgggaggctgaggcgggtggatcacctgaggtcaggagttcaagaccctgtctctactaaaaatataaaaattagccaggcctggtggtgcacacctgtaatcccagctacttggaggctgaggcagaagaatcgcttgaacccaggaggcgaaggttgcagtgagccaagatcgtgccactgcactccagcctgggagacaagagagaagctccatctcaaataaataaaatatggtacataaattatcataaaatagtgtgtggccgttaaaacatgcacacacacacatacacacacacacacacagatcatgtcctttgaagcaacgtggattaagctggagaccattactcttagaaaactaacacagcagcagaaaaccaaatgcatgttatttctaagtaatagctgaggctgggcacagtggctcacgcctgtaatcccaacactttgggaagccaaggcaggcagatcacctgaggtcaggagttccagaccagcctgaccaacatggagaaaccccatctctattaaaaatacaaaattagccaggcgtggtggcacatgcctgtaattccagctacttgggaggctaaggcagaagaattacttgaacccaggaagcggaggttgcggtgagccaagatcgcgccatcgcactccagcttgggcaataagagcaaaactccatctcaaaaaaaaaaaaaaaaaaaaaaaaaaaattaagtaagagctgaataataagaacacataaaaacaaagagggaacaacagacactgaggcgtagttgaggttagaggacaaagaggatcagaaaaagtacctgcttggtgctatgcttagtacctcagtgacaaaataatctgcacaccaaacccccatgacacaattttagctgtataacaaacctgcatgtgtacccctgaaccaaaaataaaagttaaaaagaataaaaatctatgagtgggaaacagtgcaatgcaggtggaagaactggtttgtgctacagatagcggctcaggtagaggtatactctgatggatttttgtgtttatgcaagcagatgagattatgaacaggtggtccagaaccctcagttggtggggaaaacagtttgctgttgcagattcagtgtctgggggttgggatatgccaggagacttgtagacacttttgtaggtttttgccaggaaacactagaatcaaaaatgctgttgtaaaatttctcagcatggtgcctagtcctgggagaggtctggacacattaatatctagtgggtatgctcgtgagtgagagggaatcctgtggttacagctgtgggaaaagggggtctgctgtcagagtttctttactctaagtttggatcctctctcatcctgggagacctggaatcacaggacaatgggcagtgtgacagcctgtgtacaggagagtagagcctcccattcccagacacccagagttttattccaggccaggcctctgtggtatcttttttcttgtaccaaatctgtagagtttgctgaacatcaagacattctccaacaccaactcattgtctaacatttgaatttgaattctgacaccacccagagtcagcacagaccctgattcagggctcattttcacaatattgtcctaattgcagatgccagtcacaaaccccataggcccatctatgcttctgagctactgtttaaaaattatggactcctgtaacctccctcaagtttcataatttgatagagctactcgcagaactcagcaaaacactgtagttacatttaccagcttataaaaaatataacccccaaaagagtcaaatgtaagaaatgtataagacaaagaaaaaaaatggggaaagatgaagcacatagataatcctggtaaatagctgtgattaataaaattctctatcctttgtgttctccagaaacagtttatggaaagaaacatgctttccattatgacttagttggtgctcttttttcttacctatcacatagccaaacaaagactgtgcacattttcttcttcttctaattttaaaaaatcagctggctgggagcagtggctcacgcctgtaatcccagaactttgagaggctgaggcaggtggatcacctgaggtcaggagttcgagagcagcctggccaacgtggtgaaaccccgcctctactaaaaatactaaaaaaattagccaggcattttggtaggtgcctgtaatcccagcttcttgggaggctgaggcaggagaatcgcttgaacccaggacgcagaggttgcagtgagtgatcgcaccactgcaccgcagcctgggtgacagagcaagactctgcctcaaaaaaaagctgaatttttcttcagtggtcaaaataaaatactttttaatcaaacttcacttaagtttatctccgccccataggctccttaacattcagctacactcaatctgagtcgaaatacaaccgcattttatgtccttcctaaggacatgctgagttcgaggtaaaacattaatctagaatctaactttttcaccctccatttgccatttccctcccactttcgttctaatcttgtttgttccttccttgtctgcctgaacttgcaatttttaaagatcttatagtaggcatttctttctgttacaatactcctttggaattcaatttttacattaatctaactttggtttattttaaatagtctagaaactgcttcaaaacaataacttcatcttcacaagaatcctgccagttcttttccttcttaaccttaactgcatctctctgtggggccccagttttccagggctctgtagcttctctcactataaaggtttcttccatggctgggggtgagcaggctgggacatctgcgagagaggctcttcagaaaaaaactaattgggccgttaataaccttcttttgtaggctcaatattaattagccttagcttggagtcactaggctcatgctttgatttccattgtcagagttactaacttggttttcaaaattacgtgtgtgaaaaattcagcaacattacttaaacacaatgttcatataaggggatgaaattataaggcgctttaattttatacctcaataagaaaagcaaaagtatcaattcctttcagacaatacatgtcttattatttccattaaaaatcatgtagtaaacaattagtcatatgggaccatttctaggaggtaccaagttttatctcataaaattaagcatgaaactcagaagtcaagataacaggatacagaacagagatattcactgtcacaaatttaccctgcaataaaatgaagtgatattagatgtgtaggctgggcacggtggctcagcctgtagtcccagcactttgggagaacgaggcaggcagatcaccaggtcaggagttcgagaccaaccaggccaacatggtgaaaccctgtctccactaaaaataccaaaaaaaaaaattagctgggtgtggtggtgcatgcctgtagtcccagctactcgggaggctgaggcaagagaatcacttgaacgtgggaggcggaggttgcagtgaaccaagatcgcgccactgcactccagcctgggtgacagagctagactccgtctcaaaaagaaaaaaagaaagaaaacagatgtgtctgactcatgggtcaattcagatcatccaaccacttgagagattctcccactccaacctgctcacttaagtgctcagtgaccactctcttaggagacagtgcactatgctcaagtgagtgccccaagtgtattttactttgcaagtttttgtactatctcactgaagtcaggttttttttctttcttttgtcttttgggatactattttttctttcacaaatcttagagcatttagggggcagaaattatttctgttttcccctcaatatcagcatgtgattggtggaccagcaatctgtctccaagaaatggaagctgggttgggtgaagacaattgtaatgtctcaaggggttagcttttcaaaggaagagtacaccaagagattccatcttttccccagggtatccactggggaggctgcactccctacctcaggttgtcctatgaaagaaaacgacttaggagctgatattcactagatactctagcagacatagccacagcagttatcttggtttattcagagacagtactaaaacccaggaacaagaaaaaacgacagggttgctgaggacaaatcactccataacgtttgcaaaataaaaacatcttgacactaaaacattatcataagacctttgtgcctagggaagacaaaagaaaaagaggcacagagactttttacaattcactatcaggggattattctttgctttcttctcatgggaaatacttacaaacagaaaacatatctttttctttttctttttttcaattttaaatagttttatttaagacattgcattttccacttacaatacagtgtttataaagtgcaatgctatttccttcccctgtgcatatgttccatattcaaatactgagaatgcccagtaacttactatagcagcttaactttttaaacctcccacagaatttgctacaaatttaggtccttcaaatgagaaaacatctttttcaatatgccatctaatgctttgtcaaaaaatgattaattaaaatacggtatataaaaggtacactaaaaaacaaataataaataatgtaaattagggagaggaagttggcatttgagattttcagaagaaactgaaaattcagtattttactgcaagccagagttaggctgcagaaatggggtgtggggggttgccttgagaccctgcttgggacccatgtgaaacatgcaagggaaaatcagtcccacgtggcggcaaatagactgaggtggctccaatccctggattcctaattttaaaaaatctaactcaaatgcatttttttaatagaaattactacattgggggaaacaaaattcaggcttaaaaaatgataaactgccaagtaagttctgattacacaaccaggaaatttctaggcttaaagtgaaaattaagaaactacgtaaatgtacctaaccgattactgaatttgggtattttcatcatgcatctttccttcaagatcttttcatggcccacaaactacaacccatagctgggagctctacaatttttgaaccgctccttgtttaaattcttaagtactgtcgcgataattcccatacatttttaataggcgaaaagaggaactaggaaccccataaaccaaacaaaagctctttccattcatgaaccctcacccccagcaccccgagtcaggattctgccgacgaccctctcgtggtccctgcacaatctgggagagacgcggcactgcgcgtgcagagctgcccagagagggctccagctcagggcacagtcactgggcagggaagagacaggacgcccggagcctggctgtcagcgcagccgccatcttatcgctgaaggggactgaggccgagctaggcaaggagaactaggggcacggattgtggagctgacagcggggaggcctgagtcccgccacagcctcttcccaccggttccaaccagccccttctcctctctagggatgtcggactcggcactctcaccatttctaggcttccaaggggtcctggcatcttagctgtggattcccaatacctgcaggtcacagggccacagaggctgggcctctacgagcagaggacacagaagggcgaagacgagaccaggaactccggctgcagcgagagacaaagaccccgccacatcccggaagccgccctttccgctccaaccgcgtgcctgattggacagttcccaggccagcgtctctgacttgttaacgtttaagatccctcgccctcacgccctgagtgacagaagatgtgaccaaatgctgggctgaatgaagaaagactgacagccgaaggtgcccccttttcaggcagggcttcctccctgaggtgagctaagcccacccagagggtgtttgccttaaaccttgtatataaggtctcatgtatttgtaaataatatactatacggctgctcacacatggaaagaatagaataacaattatttttaaatttctgctttttttttttttttgagacggaatctcgctgtgtcgcccaggctggagtgcagtggcacgacctcagctcactgcaacctccgcctctcgggttcaagcgattcttctgcctcagcctcccgagtagctgaaattacaggcgcgcgccaccacgccctgctaatttttgtatttttagtagagacggggttttcaccatgttggtcagggtggtctacgatctcctgacctcatgatccgcccgcctcggtctcccaaagtgctgggattacaggcgtgagccaccgcacctagcctgaatttcggcttttataaccttcctggctctggtcctttgaacaggcagcctgagatagtttttgttttgtgttaagatggagtcttgctctgtcgcccaggctggagtgcaatggcgcgatcttggctcactgtaacctctgcctcccgggttccagtgattttcctgcctcagcctcccgagtagctggaattacagtcatgcgccaccatgcccggctaatttttttgtatttttattagagaccaggtttcaccatgttggccaggctgaactcccaggtgatccgcccgctttggcctcgcaaagtgctgggattacaggcgtgagccaccgcgcccaactaacctgaggtttttaaaaggacacaatccttctaagtaaaatgtgagccacatgtgaattttaaatttcctactagccaaactttaaaaacaaggaacacacggggcacggtggctcacgcctgtaattccagcactttgggaggcgaaagcgggcggatcccgaggtcaggtgttcgagatcagcctgcccaacatggtgaaactccgtctctactaaaaatacaaaaattagcgtggtgtggtggcgggcccctgtaatcccagctactcgggaggctgaggcgggagaatggtttgaacctgggaggcagaggtcacagcaagctgagactgtaccactgtactccagcctgcacgacagagtgagactgtctcaatgaaataaaaataaaaatactttggccgggcgcggtggctcacacctgtagtcccagcactttgggaggctgaggcggatggatcatgaggtcagaacattgagaccatcctggccaacatggtgaaaccgcgtctctactaaaaatacaaaaattatctgtgcgtggtggtgtgtgcctgtaatcccagctactcaggacgccgaggcaggggaatcgattgaacaagggagttggaggttgcagtgagccaagatcgcgccactgcactccagcctgggcgacagagtgagactccatctcagaaaaaaaataaaaaataaaaacgctttttgatacgtgtgggctatttatgattttcaacactgattaaaagtactgtgcctgaaccaacctcttaccttaaaatcaaatgactatagacagacctgctaggaagacatttcatttctttcttactttttttttttatttttttagagtctggctctgttgctcagactggagtgcagtggcgtgatctcggctcactgccacctcaacctcctggcttgaagccattctggtgtctcagcatctcgagtagctgagaattcgggcgtgcgccaccatgcccagctgatttttctatttttattagagatggggttttgccatgtttgcaaggctggtctcaaactcctgaactcaggtgatccgcccacctcggcctcccaaagtgctgggattacaggcatgagccaccccgcctggcctgtattttgatttttaaaatagcagagctgctgttgaagatttcaaagtcagaagcagccgtgggacaaatctcagaagcacacgtggaaatcacacacagtgaatgcatccctcaccctgaaccaattgttttcacccaagtctgcatgtaaaaatcacctgggggggtctttaaaaatcccccaaacataagttgccacaccccaattaaatcaggattcctggagtggaaactgggcaacagtttagtttaattatctctaggtgatgacagtacagccaagctcaaatgcctctgctgtaaaccaacacttttagtgacctagttgcaaattatttctcaaatgaatgaaaaaatgtttgtccctaagtcatggcctttcagtcttaccaatattaccaaattattgttctttgcagaaccaactttactattggttttgttcctgaatcaacccagttccatacacattgaatgcactctatgtgcaaggcactgtgctaggtgccctggcattggtgatcattactgtgggggaagaattttctggaataaaggttgcattcccccaaaattaaaaacatgccatgaaccgaactggggctaaaataaaaagacgtatggtctcatttaagagttagggcttgttcgggtgcggtggctcaaggctgtaatcccagcactttgggaggccgaggcaggtggctcatgaggtcaggaaatcgagaccatcctggctaacacggcgaacccctgtctctactaaaagtataaaaaaattagccgggtgtggtggcacgtgcctgtagtcccagctactcaggaggctgaggcaggagaatcgcttgaaccagggaggtggaggcagcagtgagctgagattgcgccattgcactccagcctgggcaacaagagcaaaactccgtctcaaaaaaacacgttggagtggggactgtcagaagtttgcaccttatgcaaaggacacaatgacatacctagtcctgactggtttgtcgcaccttatgtaaatgaagcacctctcccgatcagcttgtttataaaatctcttgggcttttcactttaaaatggcaatcctttttcctgggagtcctctctgtgccagagagctttcttcctttcgcttattaaaattctgctctaacctcacctttggagtgtccgcacccttgatttcattggctctgagaccaagaacttcatgtgacatcccagataatgaggacagattcagtgccttctcaatagtgtcccaccagtgaccctcacagctaaagcacacatggggcagaaacatcaatcacctgcctgggacggccaggtgggcaggagcaagcagggactcggtgagaaaaccagaatgtgtgttcaagggcaggggccgaggattcagctgagttggaaaattccgtttctctttcagaatgtgctcctctcctggtatctgcttatctcctggaatctgagacacaacatagagcaacccccaggccagccatgactggagcctcccaagttgcagggaagggccctgtactaggccaagaacctatcctgaccagttcacccaccctgtccaccaggtgcaggcagaggccagggaccccaacttcagacagaggtaggcagcagggtcaccgcctccggcaatcccatgccagggattacagggtccctggggagacctagcagtggctgagttgagagattcaggcagggggatcccaggtgaaaaagtaagggactgggcatgtgtggggactaagagggaagtgtgtggctgtccctggagaagtgacagcaaggcacagacaagctgagtacccagatgccacacccaactgtcaggtacacaagccccagaatcccctaagcaaccccaggaagggttttatttaatcaagaaaaaaggagtcccacctccactcacacaggcactggtccttacatacattagagaacagaactcttgctctgcccaaggccagggaaagagggcaatgtctctctatcccgtgggtcacagaccttgtcctgccagaacacccaccctcagccccagaaaggtacagatgacaaccagggtgcacatggcaaccactggtgcaacccgaaaggagctgagtcctgtagggactttgggcctggggagtgcttcccagtcacagagtctttctaattgtttcactcactagctttgcccctcagtttcccccactgtggcaaaaagtcaaaattctatcctgcaggctaggggaccctgagaggtcaccacagcccattaaatgcctgcagcatgtgaaagtggggggcagtgagaggcctccctgccctgggtcttttgccctaggactgatttttatcaggccaaggccaggccagcctgctgaggaaggcaatataacctgcctggggaaccttgctcccaattacaggtcactacatttaaggacctccaatgcattagggcaggaaaagggtggaatgggggtagagcaacgcttcatcataaggggcttgggtcaaccaattgttttctcaattgagaaaaacaattcagactcctgtctgaagctgaccactcaaagagatttcgattttcggataagaaaaggcccttgggtcagaaaacaagatattctggttctggactctgcagctgtcttgggtaggggagttttgccagctttgtgctttcattgaggctaagggggtggcggggggggggcacgcggaagagactccgaagccaagggtgagagtcctgccttcctgcctccgcagcccactttccaaaagcagaggttgggcagcaaagtttcttaacaaagtcagaaaaaataatatccagaccaggcaggctaataaagtttaccaggattatccggcctaatcaccgaaacagccctgccatattcgtcctctgggacaggtgaggaaactgaggttggaggaggacaccgggagcctggccgggccactggcagcctggagccccagaggtccgggcattcaccgccctccaacaccccgccccccgcccccaacccccgccccttcttcccggcctcaggtgacttcattcccagctcattcacttgtcaataattcaggcccgcggggccaccagccctccctcaagcccccccacactcatcaggtgacgacctccctgtgtgtggctgccaggctgggggtgggggtgtctgtgcttccctcgcccaatctgagagtggcctgttccagggggcgggcttcctctttgtttggcagccaggagtctggagcgcaggtgccgggcaggcagcactgggagcgctcggcgacttggctggaggccgaaggtgccgcccctggggaaccagagcgcctttgcaaggtgggctcggcgtacactcccctatccttctgtggcccccgggcccctcctagaagaccgtcctcatctccgaggaccttgaccgccagcagccccacacccgctccctctgcctggcgttgggtgcgcacttctaggggcagacggatctaaggagcccagcgggcttgacaggcagtggggcctccagagactgtcaccgcgttatgctggccactgccgggcaggggctggtcttagctgacaccctcacctccgccctccagattccagcctctgactctggccaatctggccaggacctggggtctggggccgggacagtggacgcccctgggccgggctaccagctggggcctcgcacttggatggggaccttaaggctccaggcgccacacacaccagtgcgccctctctggccgtgaatttcagggaggggcggcagcagagcccgcgggctggcctggtggggacgatcaccttttcccacctagtcgcccttgccagtccccgcgtcgcctgcagggccgcccctcctccgcccgctggtccctccccacccgcagctctccagtcccgcgcggctcggtggccagggctccaaggcggggccgcccacgacagccactggcagggatagcgggggcaaatttcccagagcgggaagcctgccccagccggccctacggcaaagatggctctgaatccgagcccccgacacccggcccaacccacccctacagcaccctgcgtggctggctgccagcccgtcgggtacctgctcggtccctcgagctgggggccccggcagggcgggagcgatccaaggccaccgcgcggggccagagcccaaaccccaatcccagaccgcagggaccccgcccaccaggtaccgagacaggacggcctggcaggtggctggggaccggggtgtgtacctgtgggggggtcaaacaactggtcaaaagtggctttttgatttcccaaaggtaaaggctccttcgtaattatgtttttttttcttatttacttaaaacggatataatctagttagatttacccataattctgtcagtaaattcgagcacacttttattaatttttctcagtttaactagttcttttgtttgtttctatgttaagaattttaaattctacctgtaattagtagtgtgaattcaaaagtatctgagacaggtctcaatttagaaagtttattttgccatggttaaggacacacctgtgacacagcctcaggaggtcttgacaacatgtgaccaaggtggttggggcacagcttggttttatacattttagggagacaggagacatcaatcaatatatgtaacatgtacattgtccagaaaggtgggacaacgtgaagctgggtggcagcttccaggtcataggtagctaaaggacaaatggctgatttttgttttttttgtttgttttttttctttttttttagtttctgattagcctttcactgaatatgcaatttacagcgatagtcacttatgcgttagtctggcttagtgaaacaatagcgcaaagaaagcaatcagatatgcatttgtctcaggtgagcagaggggtaatttttgagttctgtctgtcctttgtacacagggattttttttgtgggcaaattgtgagggttgtctgtagcctttttctcttcatagttatcttatttggaaatagaatgggaggcaagttcccagattggcttttccttttggcctggtgatttgggggtccagagattcattttcctttcatatttcttcccttttctttttaaaatctttcagagaaagcattttagaaaaaaataagtcattggtttcagattttgcctgatctcttacggctagaacagtttattccgagaagggtaggtcccacattattaggaaagatcatttttagcaggttgtgaagtctcacatccttcaaagagaagcagggaaaggaagaaagaaaaacaataaaaacaaaaaaagcaagaataattttggaaaatcaatataggtcatattactctgaagtctttacatcaataggcaggtataaaggtagtttatgtatttaaataagttgttttctttttttcgaagtttaagtttgtctggcttcagtttgcagggctttaagaaagcacaacttaggttttagttatttgaaatcagaaaaaaaaaatgaaaaaagaaataaaaaaaggaaaaaaatgtttgagacttgtagccagggacattgtagaatttagtccaaactgtaaaaagtaataaaaattgcaaaaaaaatcagttaagaccagaaactaactacaggtgtactagagtttattctgacacagaatttttctctctttagtcccattttcactaaagacaaatcataggacgaactcacttgtaaaataagttttagtcttattatacttagccagagaatttgaatcaagtcagcaagaataattatttcccttataggctccactttttttcttatattggccttgctggaactttattttattatggaagctccgattcaactttaatgtcttaagcccatcatgtgcctgcaaatacctgtattagtggggtgaatatctcacctcatttaaagaatttaaaattgtattagtcttcttcaggcttcagaagcaatgctaggcttctgaccaatacataagctcatgtgggctaagcatctacatggagagtaaacacccatcagtcatgagaaacttcaaataagacagggcgtatgctatagaacttctcaaaacttgggaatctgaccaattctctgtgtttcagaacatcctgagacacaaactaaaagattaagcattattgactaaatcttgaaggctgcacatttgaatgctagctgacaatgtcagccactggcccgataatgtaagctggcagcctcctactgctctcttgaagtctcacctgtagagtagatgcactacccagggattcttctaactggaactccagatggctgttttttggaacttcccagcactgcttgatctggatgtaggtatcctcccgaacttggtgaatatatatgtgtatatacgtacatattttccttttctcccactttagcctttgctaagtttaccattatactgttttactacattaatcattaaacttttctcctaactgcatttgagtgtaatattgtggtttcttttgctcatgaatcctcaaacctatgatgaaagtaaatctttcagcaaaacacccccaggttacaaaaaacttgggctccttggcctgtcagaaagtggaattctttacttaccacaggtaaggaacctgcacaggaactgtgtagaagaggtgtaaggccagcttgttcgaagagcttatattatttctataagccaactatgataccttaaaggggtctgtatctgaaagcatgacattccaggcaataccttggtaaaacaaccagtgtctccaattgtgttctgttacaaaaaaaaaaatagattttttttttgagacagtgtcttgctttgtcaccatggctggaatgcattggtgcaatctcagctcactgcaacctctggctcttgcacttaggtgatcctcccacctcagctcccaagcagctgggactacaggtgagtgccatcatgcctggcaaatttttatatattttttggtagacagggggcatctcataatgttgcccggactggtcttgaactcctgggctcaagcaattcacccaactcagcctttcaacgggctgggatttacagttgtgagccactgcacccagtaagaaaatagatttttattgcacttaatgcaaataactatattgttataagttaagaatattcacaacagggcacagtggctcatgcctgtaattctagcgctttaggaggccgaggtgggtggatcacaaggtcaggagattgagaccatcctgaccaacatggtgaaactctgtctctactaaaaatacaaaaattagctgggcgtggtggcgcatgttagttatcccagctactcaggaggctgacgcaggagaatcgcttgaaccagggagtcagaggttgcagtgagccaagattgcaccactgcactccagcctagtgacagagcaaggctccacctcaaaaaaaaaaaaaaaaaaaagggaatactcacaactagttttcaaattttggagaaatcaggtggagagaattatgctccaaattttgtttataataatatattttactcaatctaattctctgttcaagttgccaagaacctggacaccctccactagtaacacttcctctatgctgcataacttttgtagtacagagttgtatgtcttttaaataatctacattatctgactttttccatgatacattttgtattttgtatccagttggaaaagcatttttattatctgtgcaaataaatatattctcacttattttcagctgataaccttagccacatatttttaaaatattttttaattatctgtaagatgatataataatcttactttatatgttctgagtgaacatgtaagtatctggacactatgtaatcaactaatttttataatacatttcaaatgcttcttttatcagacactctacttattttaaatgcatccttttaaaatacattctatgaatggataaaaaatgaccagatgtcataaatatatgcgaaggtaaatgtaaatgcaaatacacatctgtttagacaatgctgctttcaaaatcacagagaatggccactttttaaccttttattgtaattaaataaaataacagattttccatctttttttttttttttgagatagagtttctctgtcacctaggctggagtgcagtggtgagatctcggcccactgcaacctccacctcccaggttcaagtgattctcccgcctcagcctcccaagtagctgggattatagatgcccactaccatgcccggataatttttgtatttttagtagagacgaggtttcaccatgttggccaggctggtcttgaactcctgacctcaggatctgcccgcctccgtctcctgagtgccgtgtttacaagcgtgagccacagcaaccagcatgtttaggggttttaaaaagccccccgggtgatttttacatgctggctggagtaaaaacaattggttcagggtgggggatgctttcactgtgtgtgatttccatgtgtactgcagagatttgtcccatggcagcttctgactttggggtcttgaaaagcagctctggcattttaaaaatcaaaagacaggatgggggtggtggtttacgcctgtaatcccagcactttgggaggccgaggcgggtggatcacctgaggttaggagtttgagatcagcctgaccaacatggtgaaaccccatctctacttaaaatacaaaaattagcttagcctcagctactcgggaggctgaggttggagaatcacttgaacccaggagggggaggttgcagtgagccaagatcgggccactacactccagcctgggtgacagagtgagaacctgtctatagtcacttgatttcaagttaagaggttgtttcaggcaaagtacttttagtaagtgttgaaaatcataaatagcctacaaatatcaaacctggtttaactttttttttttttttttgagatgaagtctcgctctgtcgcccaggctggagtgcagtggcgccatctcagctcactgcaatctccagctactgagttcgagcgattctcccgcctcagcatcccgagtaggtggaattacagtcgcccaccaccatgcccggctaattttttttatattttagtagggacggggtttcaccatgtttgttggtcaggctgctctggaactcctgacttcaggtaatccagccatggcctcccaaagtgctgggattacaggtgtgaaccactgggcccagcctattttgagattttgtttttgtttttgtttttgttttgagacagagtctctctctgtcgcccaggctggagtgcaatggtgcgatctgggctcactgcaacctccgactccctaattcaatcgattcccctgcctcagcctcctaggtagctgggattacaggcacatgccaccatgcccagctaatttttgtattattagtggagacagggtttcaccatgttggccaggatggtctcgatctcctgacctcgtgatccacccgcctcagcctcccaaagtgctgggattacaggcgtgagccacggcacccagccctattttgagcttttgacataattgccaggcttcccgaaatcaaatttcagcttaaaaattgtcttctttttgacccttaacttttgggtgctacagagcaccaacgcagcatctaaaacaatgataaacagaattacttggtatgtttaattacatgggaagcattgtcaaattaaaaacactttttgggtcaggtgtggtggctcatgcctgtaatcctagcactttgggaggctcaggcaggtggatcacttgaggtcaggagtttgagatcagcctggccaatgtggtgaaaccctgtctctactaaaaataccaaaattagctgggcatggtggcccgctcctgtaatcccagctactcaggaggccgaggcaggagaatcgcttgaactcagtagctggaggttgcagtgagctgagattttcccactgcactccagcctgggtgacagagctagagttcctctaaaaaaaaaaaaaaaaaaaaaacccaagaattaaataaaaatgatgtttgaccttcaacttatattttaataaatatgtgattaatatttatatcaaaatcatatgaaatttcaaaaattttatgtatctgagtatattatagtagtcataattgtgattttgataaattattgtaggccacagatataatcaatttttgtttctttataaccattttaagttatttccacagttaatggtttaattctgatgtagtttctaaaaacctcaaaagcttgcaaaatcctagagtattatgtctttaaggaggttcatgaaaagttggaaaaggcccacacaaattgagtacaggtttctgaccattttaggatcatattatttattctggtaaggcttgtgagaattctaataaacagaccaattcttataaaactgctaacctaggcaaatcaaaagtatttgaatattaggaaaatactctgtgtaaaataatgtggcagagtattttaagatattatgctaaaacagcctgtacaaaaattttttagatataccattttagtaaactctgtggtctaagtcaaactacctatgataacccctcagttatcagagctatgctcctaaattggagaaacaaacctagtatttaagaggacataaatttaatgttaagtgtggactcattaagaacctagacagccaacagccacttactcattcctgagttcttaaaacttccattcttaacagctctgcattccattactcatcacagaagagataaaataatctaaattgaatataaattaagtgtgtgtggtgattattctataataaattacgaaaataggttaagaccaatgttttcttatcaaacatttaatcctgagaagacaatcaaaacttcatgtatgtttctgctacctgatgggccatttaatcatggttacaaaaattttattcaattatcatttttaatacatattttctggtaatataaaagctttcttatgcaagaaaactgatgttataacagtagctaaaaggatataaataaatacatttttctcatggaacatttctgaaaaagcctccaatgataaagatgtttatttcactagacaaattgtaaaactgttacataaggaattacagatacaatagtattgtgcaaagctaactacattgactggattgcttttgtaattgcagattgatgacaatcagatccactgagagaggaaaaaatatgttgtcctggtgggtgtggttgctcatgactgcaatcccggcactctgggaggccaaggtgcgtggatcaggttaggagttcgagcccagcctggccaatatggtgaaaccccatctatacgaaaaatacagaaattagtcgggcatggtggtacgcacctgtagtcccagctatttgggaggctgaggcagaacaatcgcttgaacccgggaggtggaggttgcagtgagccaagattgtgccactgcactccagcctgagtgacagagtgagactgcatctcaaaaaaaaaaaaaagttggcccatataatatactcattggaaggcctatgcacctaataaaagctcatgtatcttctgctactgaagtccagtgttttttgttttttttttttaatttactttaagttctgggatacatgtgcagaatgtgcaggtttgttacataggtatatgtgtgccatggtggtctgctgcacctattgacccatcttctaagttttgcacccttgcccccaacctcccaacaggccttggtgtgtgttgttccccttcctgtgtccatgtgttctcattgttaaactctcacttatgaatgagaacatgaggtgtttggttttctcttcctgtgtttgtttgctgaggatgagaccttccagcttcatccatgtccctgtaaaggatattatctcattcttttttatggctatgtagtattccatggtgtatgtgtaccacattttctttatccagtctatcattgatgggcatttgggttttccatgaaagtctaatatttctttttttttttagacagagtttcactcttgttgcccaggctgaagtgtaatggcataatctcagctccctgcaaccttggcctcctgggttcgaccgattctcctgcctcaacctctcaagtagctgggattacagacgcccaccacaatgcccagctaattttttgtatttttaggagagatggggtttcaccatgttggccaggctggtctcaaactcctgacctcaggtggtccacccacctcggcctcccaaagtgctaggattacaggcgtgagccactgctcctggccagaagtctaatatagcatattttcaccaagtgaagaaagtcttgaacagtctattgactgaggatagtagaaccctttataatctagaatccagagactgagtcttactgccatctaccctgaagcaagacttcaagaccttgaacattgggttcatagtctcacaacttagaagggcctatccaaactctttcaattgtaaactcataggagatcttaagcaaaggtaagcaggaaagtttctcctcaaaagaagatagcaatcttgatctagacagctttctttataagatcaaaaatcaaggccgggcgtggtggcttacgcctgtaataacagcactttgggaggccgaggtgggtggattacgaggtcaggagttgaagaccagcctggccaacatggtgaaaccctgtctctactaaaaatacaaaaattagcaattagccgggtgtagtggtgtgcgcctgtaatcccagctactcaggaggctgaggcaggagaattacttgaacctgggaggcggaggttgcagtgagccaagattgcaccactgcactccagcctgggcaacagagcaagactccatctcaaaaaaaataaaataaaataaaaagtataaaaattagctgggcattgtgacacgtgcctataatcccagctactcaggaggctgaggcaggagaattgcttgaatcaggatccaggaggcggagtttgcagtgagcggagattgcaccactgcactccagcgtgggctacagagcgagactccgtctcgaaagaaaaaatcaagacatctctgctatcatagcagagtttgttcacagttttctaatggctctacaaacaacagaaataaaaaaggaatctcttgtatgcactcatggggtatactcataggtagagaattttgctgacaacattatatataacaaaacttttgccttgataggtaaaagatgaagagctaatgtgggtgagaagttttaatgaaacatttgttgcctcataatttcagaaaaagaatatcgatccactgctttaaacttacttcataagttaaaaataacttcttcagaatgggttaaagagcattgccagcaggccattactcttctgaatgggcatcatttgttagatcattttttccatggcttagcataaatgaagcaatggtaagaaatttatccccaaaaatagggctctatagcagattctaatgtaaagactatggttacgcaacaggtgttaaatgttgttactaaagttgtgctaaataatagaatttcttttgattacttactggataaacagagaactacctgtgctgttgctgatacttgtagttgcacatggtagaatacattgggtattacaaagatgcaattgtaggggattaatgaacaggctgcttggttgaaatgagatcatttatctagctaattatttaatctattgaattttagttggttgttcatggggaccctggctaagaagcatggtttcaacattttttttttttttttctgagacaaagtcgcactctgtagtccaggctggagtgcagtggcataatctcgactcaccgcaacctccacttcctgggttcaagtgattctcctgcctcagcctcccgagtggctgggattacaggtgcacaccactgcacctggctaatttttagtatttttagtagagacggggtttcaccatgttggccagggtgatcctgaactcctgacctcaggtaatctgccctcctcggcctctcaaattgctaatattacaggcatgagccactatgcccggctggtttcaactcttggtattatcctcctgaaaatcaaaatagtagtctccctactgcaccgtattctctcaaaagttctaaaggtttgcatacagtcatctctagaatgtcaaatggtgtctttttaatgggaatgacagaaactcaaagacatatgtgactatgaagacaccataacctgtgaataacattataaggacaaaaaccctaaataatggaaattgagagtggcactaaggccctgagttttggtcacactctgacctacgtaagaactttaccaaaaagggagagttttaaaaacaaagttggctcagcgcggtggctcacacctgtaatcccagcactttgtgggccgaggagggcagatcacaaggtcaggagatcgagaccatcctgccaacagggtgaaaccctgtctctaacaaaaatacaaaaattagctgggtgtggtggtgcgtgcctgtaatcccagctacttgggaggctgaagcaggagaatggcttgaacccacaaggcagaggtttcaatgagctgagatcacaccactgcactccagcctggcgacagagcgagactctgtctcaaaacaaaaagttattggagtccatcattgtaaactgagcttgtgcactagttccaaacagaccaaaccaaactgaaccaaaacaagtcacttgtgctaaatgtgacataatcaaactgaaaatttaagaaaataggtagatcctaaaacaggccaggtttatatttttcttctggaaacagcagatttcaacacaaggaagccccttctaaccttttaaaaataaataataggcctggtgcagtggcttatgcctgtaatcccagtactttgggaggctgaggcaggcagatcacctgaggtcaggagttcgagactagtctggccaacatggtgaaactctgtctctaccaaaaatacaaaaattagccagcagtggtggcaggcacttgtaatcacagctacttgggaggcccaggcaggagaattgcctgaagccaggaggcggagtttgcagtgagccgagatcacaccattgcactccagcctgggtgactgagcgaaacttcatctcaaaaaataaaaacacaaataaaataaaataacctgaatccatgtttccacttaaaaaacccccacagttctgcttttttacagtaggatttgacactaaataagtaaatttttatttttattttttgaaacagtcttgctttgttgcccaggttggagtgcagtggcgcgatctcggctcattataacctccgcctccccagttcaagtgattctcctgccgcagcctcccaagtagctgggattataggcacttaccatcatgctcggctaatttttgtatttttgtagagacagggtttcaccatgtgggccagcctggtcttgaacgctgaccttaggtgatctgcctgcctcggcctcccaaagtgctgggattacacacgtgagccaccatgccaggccaataagtacatttttgatggtgacggagtgatattaatatctaaagttggtttttttttttttttgagatggagttttgctcttgttgcccaggctggagtgcaatggcgcgatctcagctcacgcgcaacctctgcctcccgagttcaagcaattctcctgcctcagcccctctagtagctgaaattacaggaatgcaccaccatgcccagctaatttgtatttttagtagagacagggtttctccatgttggttaggctggtcttgaactccagctcaaaaaaaaaaataattatgggagccaccacaaaaatattaaagaatttaatcaaagagagttgttcaaaaattatagagcacccctatgggttgtagtttgtggtccattgcaggggctttaagaaaagacttttataaagtgcatgatgaaaaaatccaaattcagtaatcagatatagttacgtagtttcctaatttccaccttgagcctacaaatttcctggttatgcaatcaaagcttaattggcagattatagttggttaaacttgaattttgtttcctctaatgtagtaatttataaaaaatcgaactcatttgagttcgatttttttttaaataggaatccttcttttctcttctctcttctcttcttttctttgcttctccctcccttccttctttctttctttcttttttttgagacggagtttcgttattgttgcccaggctggagtgcagtggcgcgatctcagccaacggcaactccgccccccgggttcaagcgattctcctgcctcagcctcccgagtagctgggattacaggcacccgccaccatgctcggctgtttacatgtttttcaagcagggtctcgaatgtaccccccaataactttttttttttttttgagatggagtctccctctgttgtccaggctggagtgctatggctcaccgtaacctccgcctctcgggttcaagcaattctcctgtctagcctcaggagtagctgggattacaggcgcctgccaccacgcccggctaatttttttttttttttccagatggagtctcgctcttgttgcccaggctggagtgcaacggtgcagtcttggctcactgcaacctccacctcccgggttcaagcgattctactgcctcagcctcctgagtagctgggattacaggcatgcaccaccatgcccggctaatttttgtatttttagtagagaaggagtttcaccatgttggtcaggctggtcttgaactcctgacctcagatgatccattcacctcagcctcccaaagtgttgagattataggtgtgagccactgagcccagcctttttttttttttttttttttgagatggagtctctctctgtttcccaggctagagtgcagtggcataatctcagctttgcctcccggggttcaagcaattctcttgcctcagcctccccagtagctgggactacaggtgcatgacaccgcatccagctaatttttttgtttttgtttttgtgtttgtgttttttttgagttggagttttgctcttgttgcccaggctggagtgcaatggtgggatctcagctcaccacaaccttcaaatcccgggttcaagggcttctcctgcctcagcctcctgaggagctgggattacagccatgcacccctacgcccggctaattttgtatttttagtagagatggggtttctccatgttggtcaggctggtctcgatctcctgacctcaggtaatctgcctacctcggccttccaaagaaagtactgggattataggcgtgagccatcatgcctggcttttttttttttttgtattttagtagagatggcttttcaccatattgggcaggctgatctcgaacttctgaccgcaggtgaattgcctgcttcagcctcctgtttttaatattttcatcataaaatctttgtcagtttctatgtctagaatggtatttcctaggttgttttccagggcatttcttccttataattttaaattttacatttaagtcttgaattcatcttgagtttatttttgtatatggtgtaaggatggggtgcagtttcaatcttctacatagtatttgctagttatttcagcatcatttattaaatagggaattattcccgcattcctcttgtcagccttgtcaaaaatcagatggttgtaagtgtgaggcattatttctgggctctctgtcctgttgcattggtctatgagtctgcttttgtactagtaccatgctgctttggtgtctatagccctgtaatatagtttgaagttgggtaatgtaatgcctctagctttattctttttgcttaggattaccttggctgtttgggctcttttttggttccatatgaattttaaaatagtgttttttagttctattaagaatgttgctgggtgtggtggctcacgcctgtaatcccagcactttgggaggccgaggtgggtggatcacaaggtcaggagattgagaccaacctggctaacacagtgaaaccttgtctctactaaaaatacaaaaaattagccaggcgtggtggcacccgcctgtagtcccagctacttgtgaggctgaggcgggagaatcacttgaacctgggaagtggaggttgcagtgagccaagaccacgacattgtacttcagcctgggtgacagagtaagattctgtctcaaaaaaaaaaaaagaaaaagaaaaaagaaaagaatgtcttggtagtttaatagaaatagcactaaatctgtaaaaaaattttaggcagtatggctattttttttttttttttttgagactgggtctcactctgtggtcaggctggagtacagtggtgccgccttggctcacggcaacctctctctcctgggttcaagtgattctcccacctaagccttcccagtacctgggactacaggtgtgtgccaccacatcatctaatttttgtatttttttgtagaaacggggtttcactatgttgaccagcctggtctcaaactcctgacctcacgtgatccagccacctcagccttccaggctatgaaacagttttccatttgtttgtgtcatctctgacttcttagcagtgccctgtaattttcgtcttagagatctttcacctccgtggttagctatattcctagatattttattctttttgtggcaattgtgaatgggattatgtttttgatttggcttttggcttggatgttttttatgtacagggatggtactgatttctttacatttattttttatcctgaaactttgctgaagttgtcagtttaagaagcttttccaggccaggcatggtggctcacacctgtaatctcagcaccttgggaggccaaggcaggtggatcacctgaggtgaggagttcgagatcagcctggccaacattgtgaaacccgtctctgctaaaaatacaaaaattagctgagcatggtggcgcatgcctgtaattccagctactcgagaggctgaggcaggagaatcgcttgaacccaggaggtggaggttgaagtgagctaagatcatgccattgcactctagcctgggtgacagagcaaaactctgtctcaaaaaaaaaaaaaaaaagaagaagcttttctgcaaagattatagggttttctagatatagaatcatgccatctgaaaacaaggataatttgattttttttttctttttggatgccttttatttctttctcttgcttgattgctctggccaagacttccaattctatgttgaatacaagtggtgagagaaggcatccttgtcttgtgccatttttcaagaaggaatgcttgcagcttgtgtccattctgtatggtatctatggatttctcataaataactcattattttgaaatatgtgcttttaaggcttttagttttttgagggttttaaacatgaaggatgctagattttattgaaatatttttctgcatctattgaaataatcttgtgattcttgtatttagttctgtttatgtgatgaatcagatttattaatttgtgtgcactgaaccaaccttgcatcccaggactaaagcctaattgatcatagtgcattagctttttaatttgctgctggatttgctttgccagtattttgttgaggatttttgaagcaacattcgtcaatgatattggcgtgaagttttcttttttgttttgtttctatcaggttttggtgtcagaatgatgttgttcttacataatgagttaagggttaagggggagtcccttcttttcaatttttaataatagttatagaaggtataataccagcttttcttcgtacatctgctaaaattcagctgtgaatctgtctggtctttttttttcccctgtttttggttggtaggctatttactactaattcaattttggagcttgttattggtctattcagggctgcaatttagtatttttttagtcttgggagagtttactcatccaggaatttattcacttctttcagattttctagtttgtgtgcatagtggtgttcatagtagacttcaatagttatttgtatttttgtgggactcaatggtaatgtcccttttgtcatttctaattgtgtttatttggatcttctttcttcacagtcttgctatggttcatctcattattttttccaaaagatttaactcctggatttcttgatactttgtataacttttcatgtctaaatctcgttcagtgcagatctgattttggttatttcttgtcttctgctagcttaggggttggtcttctcttgcttctctcattcttttatttatgatgttaggttttaaaatttatttttaacttttttatttgagtttttagtgctataaagttttttcttaagactgccttagctgtgttgcagagattctggtaggttgtatcttcgttgtcatttgtttcaaagaacttcttgatttttgccttaatttcattattttcccaaaagtcatccaggttcagattgtttaatttccatgtaattatatggtttcaggtggtttcctatatattgaattatatccttatcaagctgtggtctgtttgtgtttttggtatgattttgggaagactgaatttgctgagaattgttttatttctgatcatgtggtcaattttagagtatgtgacacgtggtgatgagaagaatgaatacaatgttggttttagatggacacttctatagatgtctagtaggactatttgatcaagtgttgagtttaggttttaaaatctttgttaattttctgcctaataatctgtctaatagagtctgtggggtgttgtagtctcccactattattttttcagaatctaactctcttcataagtctctaagaaattgctttatacatatacacccatgcattttttagaacacttttctctcttctgcttttttgtttttgagatggagtctcactctgtcgtccaggctggagtgcagtggtgcgttctcggctattttttatgtttttagtagagacaaggtatcaccgcgttagccaggatggtctcgatttcctgacctcttgatccgcctgactcggcctcccaaagtgctgggattacaggcgtaagccaccacgcccggatataagcattctttcaagtgcacacacggtatgcccaaggctgcttcttagatgtctgaatacagtgtctaattaaattcagatgtccaagagtttaagaacatgtccagagacttggctgttgtaggagaaaatataaattagaaataagaagctttattctgttaactgaaaataagggaggatattgtgtttctctcttttcttaaagcatttagattatatgtacatatttttctctgcttttaaaaaatatttgtaaatcttttttgttgttgtttgttttgttttgttttttgaaatggagtcttgctctgtcgcccaggctggggtgcagtggcacaatctcagctcactgcagccaatctctgtctcccaggtttaatcaattctctgcttcagcctcccagtacctgggattacaggcacccgccaccacgcccggctaattgttttgtatttttagtagagacggggtttcaccatcttggccaggttggtcttgaactcctgaccttgtgatccaccagccctggcctcccaaagtgctgggattacaggcgtgagccactgcacctggccaatatttgtaaatcatatttacagctagatcaatcttgtggttttttgttttgttttgttttttactcagaatcgtcttaattgagaaccacagaaccattgctttgtttttgctttggcaaaagtatatacatatatatatatttttttttagtcttttaaagtagacatagatttgtttagattaaagctcattttaagagccacaaaaattgaacacaaagataggattacatttagcactacagagtgatagagattaaaagatgctgagtaaggttctttgacagaaaattgataatccaaggtaattatctaatatttgcaggctgaagtacttacactgcaaaatcaaaaaccgttcagtgtataaactgaacagtggagtctgtagttgtatttggtttcgatttattacttcagaacaattagcatagttatttgtagtgtttgtagacaacttgcattcatataaattatgcagtattttctacaatagtatgaatatgacacaatatttagtaaatttttttttttttgagatggagtctcactctgttgcccaggctggagtgcagtggtgccattttggctcactacaacctctgcctcctcggttcaagcagttttcctgcctcagcctcctgagtagctgggattataggagcacgccaccacgcctgggtaatttttgtatttttagtaggtacggggtttcaccatgttggccaggctggcctcagactcctgcctcccaaagtgctgggatttcagatgtgagccaccatgcctggccacaatatttactttcaatgagtttcctttatttttttttttttttgaagcagagtcttgctctgtctcccaagctggagtgcagtggcacaatcacggctcactgcaacctctgcctcccaggtacaagcgattctcctgcctcagcttccccagtagctgggattacaggcgcgcaccaccatgcccggctagaatttcttaaatagttattttaatattgttattcatactttttaaatataaaatgttttaactgaattatggttacaagtaatttttaataattctacattatgactagtacattaaaattatttatccttagatatttatatctaatatccaaagaaaattcactacaaaattgttgtagtagatatgagtctgacatgcttattagtttatccaatagggataattataggtaagcatgattttaatgtctattatgtcactaaatttgaatgctgctattacaggacaagcaaacatgacaagtgatgtggccatgccaagattgtaatagctcttcagttagctatgctgcaagctcaaatatattccagtgtgtaaacaaagccagattcaaattcttcatctaatgtgctagtggaaattgtcagatgtgtttcaatatagttcccccatctaatggttaggagatgagacagcagcagagatgaaagagaaaccttataaaattttgctgagaatttgtaccccctgctttttttttcgagacagagtcttgctctgttgcccaggctggagggcagtggcacgatctcggctcactgcaacctctgcttcccaggttcaagcgatccttttgcctcagcccccctagtagctgggattacaggcacgcaacaccaggcctggccaatttttgtatttttagtagagacggggttttgccatgttggccgggcaggtcttgaattcctgtcctcaggtgatccgccctcctcagcctcccaaagtgctgggattacaggagtgagccaccacgcctggctcatcccctttttaaataatgttcatgtttctcatgctgagaatagttgtgcactttgggtatttaaagagaaatttttaactttttattttctctcaatataatcttgctcagatagagagctgttttttgctcaaatcctttgggtgtctgtttcaggggtcctattagtatcccatggtgtctgtgaataaggtgggctgtcacagggagaattcttagatctatctctatctggactcatgctggaaatccagcagtatttttttcatgtcaccattataaatagaagctgaggctgaaacactgctcccattcccattatcgtgaaggtgcaatttcacccaggaggcctgcaggctctcctcctgcagctcaggcttcattgtctgatgggacgctggagtgctgctgtggcaactggggttcatgtaagatgtgagctgccagtgacaagctttatgttgtggcctctgcgtcagtggcagatggtaggcgtcaagagaggacatggccatcaggagagggcaagcagggtgctctagcccagtgctaaaggagtaaagagccattgctttaaaatataaatagccaaaaagataacaccctattcaaccatttctgtaggagagtgggagcctaccttcagcaggcacctggcttcaagttgcaaaattacctcctgttatgaagatgtgaaaagtttattttgtcattgaatataaccaattagcatacacggatggccttgccaattaccagcggaatttaggatgaactacgtatgacatggtgctgtaaatttttctacttgtggactaactatggtgactgtctttctgtctttgcaatctgttgagcagattgactgtgatgcgtgtcacattcaggttaaattgtgtaataaaacagttttctttctgttctctcattttggagattttctggggctggagaaaatttttcttttaattatattttccatacactgtctagaattagcagacatgatataaacacatgccaaccaagctttactctagagaggatttttcctctcaggcttccagtcagctcatacatttctacaaacttcacaggatggcaatcaaccatttcacctctttcagtgactcttgtatcttcagacctgaaactaattcagagaccagggggcccagaaacccaatcagagtaacatgtgagtgttgagtagacatgtagatatgagaatctccactttccccttcctcctattgctaaaatacccacaaatatgcaaataacacctgctgaagctccaaattctaaatctaggtcttgagatttggaaaacaaaaaaaaaaacaaaaaacctttcatctgaggaatgcaagttcttttagttgtcaaactcagagagacattaaaatgacaacacagttttgtctttttcccatctttaaattatgtgttttttttttttttttttttgagacagagtcttgctctatgaccaaggccagggtacagtggtgcgatctctgctcactgcaacctccgcctcctgggttcaagtgattctcctgcctcagcttcccaagtagctggaattacaggcacgtgccctggctaatttttgtatttttagtagagacagggtttcaccatgttggccaggctggtcttgaactcctgacctcaagtgatccacctgcctcgacctcccagactgctggaaaattacaggcgtgagccgctgcgcccggccctgaattatgtatttatctcttaaaactgttagctactgccaccaatagctataaattaaactaataatgccacactggacactataaccatactctaaattttaacgatgtatatccaatcaataatcaatgtcatttctgtaaattaatgaaaatttctgataaacaattttatatcagccatctctctgtccttctctttttgccttttcggatcgacttataactgctcctaatcaaagtgtagatgacctgcaacttgaaggtttgctcccaggttacaatcctcaagctttgcctcaataaactgtctacttatattcatgttgccttagctttatttcttttaggtagacatatcatttagaacgtgctaaagcagcctctataaagggatctttcctttgattgtactctgcttgctgtaacacccaagaatgaaaagccaggttgatcccacctagaatctgtaaataaggtctggcgtcttcctggaatttataagataaggccagactttgaattgagaatgtagaaaaaaccaacaagagacattttctgcattgtcagatgtcaacatagacatcttaaagttcccctttgagaatgtgattctttcagcttctcagatcttgtccggtgacatgctacagttatgtaaggggcatcaggtataaatagaatctgatggcagaatatgtaagtgtgaacaagtatcttcagagtgagagatcaagatgataatgtatccagagccataaccaaaactatacctacctataaaatgtgggactggagtagaatattcctgttcttcctcttacctaagagctagataatcaggacaggtgatccagattctcgagcttctccagggcagtttaattttttatttagaattagcctgagtcggccgagcgcagtggctcacacctgtaatcccagctctttgggaggtcaaggtgggcagatcacctaaggtcaggagaccagcctggacaacatggtgaaaccctgtccctactaaaaatacaaaaattagccagacgtgttggcatgtgtctgtaatcccagctactcaggaggctgaggcaggagaatcgcttgaacttgggaggtggaggttgcagtgagccgagattgtgtcactgcactctagcctgggagacagagcgagactccgtctcaaagaaaaaaaaaaaaaaagaattagctaattagcttgagtctctcctgcctggcttatcattgggccatcagcccagggtcactgggaactctcacaatcagctgggtgtctttgagacatttgagcacgtccggagcagaattgtgccaggttaacaaaagtggttaattctgcttgtctcagtgtaaaaattgagtcatcctgtgtttgctccttccctcacacaagagatgactttggtgggtacccagatgagagtttctccagttttctggtacttgggtgaaaaacaaccaggatgtctggagactcaaacgaataaactaattgcttttatttcatatggccattagaaaaatagatgaagcagtcatagttcctaccatccaggaacttttagtctagactagcacctgaataaagggttgaagtaagcatcgtatggttgatacaatgaacagatgtgtgcaaaaaaccttgggctttatctgggcccctttctttatcttgtagtgacttcttatgtcatcaactaaagggatatttatgaaaagaagagttgttattattacatgcatttctattacctaagaatatatatttatcttctaataattaccctagaaagccttacgatatttatttaaattgcttattagtatgcattatataatcgacagggcagtggctaaaaaaaaattatataaactctgagatataagtttctcttaggcaagcttagggaaacacaactggaaataccccagtggcacagagaacagaattctacataaggtccactccctgcccagttctgttcagattcactctatttgagggtcttatttagatctggccccactctggagtcttgcctcacagaactgattggaagagatcagagttttggctggtgaatcctgctgcctttctaaagctggtactcacaattttctgcaccccgaaggagataaatgggaaaaataaagtatatattttaaggtcttcatttttaaattttctattaaatcagtgcttgcagagacattccatttagcaacttgttttctattcctgcagattcagtagttgctccacaagtcacaaaaaagcaaatataaaccacaataaaagtttctctaaactgcattaaacttttctgtattccagtcatctgtctacatttagcttttattgtatacattttctttaaaaaaccaagaacagaaacagaagatgaaatacatatgctgggcccttaacctaatgctgggaattatcaaacacttagtaccaactcccagtgtgttatgaggattaaatcacataatgcattatttctagcgcagtgctctgcaacatactcttgcttacctagtacctgcttagtaaacattgcattagtccatgtgtacatgttgttttccaaatgcaggcttattcaggcactgctaccttttgttgcctctgtaaactttaaagagccagcgaagaatttgatgctttaggatggagattagttgtcttcatttgtgccagaagtatttgtgttgtgacaacagtgccaagtataagggactctgtgctgtgcctgctttctctaactaatgctaataatgagcctgggggagcatcatccgcattgacaggggacttatttaaaacacacattcatgtactctttgaaaacctgaagaatcacattacacagaaagagattaaaattaccgagtggtttataaactcattaaagcttgagagacaatgcttagctaagtggttataaacccagggttctattagtttggtgcaaaagttattacagtttctgccattgtaattaatgtggattacttagatgtggatactcagattacatggccaattcacagaaatatctttgctcgtgccctttccacgggttctttttattgttggacacatccatgttgttttaattaagagcctcatgtgattctaaggtgaggccagaatcacgtatgaggggttgaagatacactcatgagagttcagtttcacctctttactacagggtgatcatagggcctgttctgtttggttttggtatggacagggcagtgtggcccatattttcattactgtagcagagattgttggtatctgtgccagggaagggcacctaagacaggaaaggagaaacacatatttctataatcatggagcaactaattgttcctgaatttttcatgttataaaggacagaaatgggtggactttttcagcgggtcttggtacttctgcctgtgggtgtggtggtagcaggtaaacaggtggtgctgacacctttaaaggcatattctcaagatgcaggtctaatttgtccagagaatctcaactgaaaaggaatcccagggaaggaggagatacggaaaaaatatgcctttttttaagctaaacacgtctcagatcaagagctgtgtccattctgcctcctgaaattccatgcgtttagtacttgcaaacctttacttctcttcttgtgtttttcctccctaatgagtttaactactttttaaaaattttattgatagtcaagggtctctgaaaaatatttcttatttatttatttattatttttatttatttatttatttttttagaaggagtctcgctctgacacccaggctggagtgcagtggcgcgatctcggctcaccgcaagctccgcctcccgggttcacgccattctctgcctcaacctcccgagtagctgggactacaagcgcctgccaccacgaccggctaatttttgtatttttagtagagataaggtttcactgtgctagccaggatggtctcgatctcctgacctcgtgatccgcccgtctcggcctcccaaagtgtagggattaccgtcgtgagccaccacgaccggcccctgagagaaggcattcttgtcttgtgccagttttcaaaaagaaatggtttcaacttgcatctatttggtatattggctgtgggtttttcatagataactcattattttgaagaatgtaccttcaatgcctagtctattgagggtgataacataaaggatgttaaactttattgaaagatttttctgcatctattgagataatcttgtgggttttgtctttatttctgtttatgcgatgaatcacttttattgatttgaagcaaccctgcatccagggataaagcttacttgatcatagtcgactgacttttattttatttatttattttttgagatggagtctcattttctcgcctaggctggagtgcagtggcgtgatatcagctcaccgcaacctccgcctcccgggttcaagcgattctcctgcctcagccttccaagtagctgggattacaggtgcctgtcaccatgcccgcctaatttttgtatttttagtagaaacgaggtttcaccattttggccaggctggtctcgaactcctgacctcaggtgatccacccacctcggcttcccaaagtgctgggattacaggcgtgagccaccacacccaacccatagtcgattaactttttgatgtgcttctggatttggtttgtcagtattttgttgggaattttttatcaatgtttattaagaatattggcctgaggttttctttgttttgttttgtctctgctaggttttggtatcagaatgatgctgttcttatataacgagttggggaggagttccttctcaattatttggaatagttttagtaggaataatagcagttctttgtacatctggtagaattcagctgtaagtctgtctggtcctgggctttttttggttggtaggctgtttattactaattaaattttggagctttttattgttctattaagggattcagtttttgttgttgttgttgttcaatcttgggaagatgtatttgtccaggaattcattcatttcttctagattttctagtttgtgtgcgtagaaatgttcactgtagactttaattattatttgtatttttgttgggtattgtctgttttatcatttctaattgtttcttcattaatctagctagtggcttatttattcttcattaatctagctagtggcttatttattcttcattaatctagctagtggtttatattattaattttttcaaaaaatttactcttcgatttctccatctttcttgtagttttttatgtttaaatcttcttcagttcagatgtgatttttgttatatcttgtcttctgctagcttaagggttgatttgttcttgcttctctcattcttctatttatgacatcgggttgttaaatggagatttttctaactttttgatgtgagcacttagtttatagcactgccttagttgtgttgcagtgattctgctgtgttgtatttttgttctcacgtatttcaaagaacttctcaatttcattttagtcattcaagtgtaggttgtttaattttttatgtgtctggtttcaagtgcttttatttgtattgaattatatttttatcaagctgcagtctgagtgtgttgctgatatgatttggggatttttgaatttgctgaggattgctttagttttaaatgtgtggtcagttttaaagtatgtgctctgtggtaatgagaacgatgtatattatgttgtctttagatggagagttctgtaggtgtctgttaggacaatttggtcaagtgttgagttcaggtcctaatatctttgtggtttttttttcctcagtaatccatttattagtgtctgtggggtgttgtagtttcctcctattattgtgtcagagtctgtcttcataagtcactaagaacttgctttatttatttgcacccataaatttatataacacatttttctcttctgcttttttccccataaacacagtgtgcccaaggctattccacagatgtctgaattcattgtctactgaaattccgacgtcttgacagttcaacatgttccaggacatggctgttgtaggaaaaaatatgaattagaaataagaggatttattcacataccttaaaataaaggagaatattttgctcttctctcttttcttatagcatttatattatatgtagacaattttctctgttttttttgaaatatatggaagtcatattaacagctaaataaaccttttggcattcttttttactcgggattgtctttatctaggaccttagattcattgcttgtttttgctttggcaaaagtttatattttttgttattagccttctaaggtagacacagatttgtttagataaatgtcattttaagtgcacacaaaagtttggcaccaagataggattaaatttagcaatacagaatgattaaagccaagagatactgagtaagttcctttgacagaaaactgattatctgaggtaatgatctaatatttgcaggttgaagtacttacactgcaaaagcaagtgtagttcagtgtataaactgtggagtctgtagttgtactttgctttctattttatacttcagaataattagcatagttatgtgtactgttagtaaacaacctgcatttatataaattaaacggtattttctacaatagtattcatacaatagtaggaatataagggcaaaatatttactttgaataattgttttaaataatcattttaatattgttaatcatactgttgaaatgaagttttttaactgaattatggctacagatacttttaaaatattttacatacattatgactattacattaatttatacttatttatatctaatatccaaaaaattgctaccaaattgttacagtaaatatttgtctaacatgcttattaattgatcccatatgggtagttacagataagcataattttagtgtctttcatttcactaaattggaatgctgctattacgggacaaataaacaccagtgaagtggtcactgagaaaccataataactgttaatttagctgggttgcaaggtcaaatgtatttcactatataaacaaagtcagatttcaatttttcacctacaagggcttatgaaaattgtcagatgtattccattgtagatctcccattcattggctaggagataagagagcagcagagataaaagagaaaccttataaaattctgctgagaatattttttcctttttcataatgctcatgtttctcatgctgagagtacctgtgcactttgggtttttttgttggtttgttttttgagacagagtctcgctctgtcacccaggctggagtgcagtggcgtgatcttggctcactgcaacctcctcctcccaggctcaactgattctcctgcctcagcctcctgagtggctgggatcacaggcacacgccaccaagtccagctgatttttgtacttttagtagagatggggtttcaccatgttggccagattggtcttgaactcccggccacaagtgatccgcctgcctcggcctcccaaagtgctgggattacaggcatgagccaccacacccagcagcactttggggttttagagagaaattcctttaaggagaatattttctggctgatttgatcaagtttatgtctaatcaaagtgttgttcttaagatgcctttaactttttttttctccatataatcttgctcagactgagagctgtttttctctccagtgctttgtatggctgtttcagggatcctgttagtatcccatggtgtctgtgaataaggtgagctgtcacagtgagaattcttagacctatttctatctggactcatgctggaaatccagcagtatttttttcatgtcaccattataaatagaaactgaggctgaaacactgctttcatttccattatcatgaaggtgcagttctacccaggaggcctgcaggctctcctcctgctactcaggcttcattgtctgatgggacgctggagtgctgctgtggcaactggggttcatgtaagatgtgagctgccagctgtatgccctgtgctgtatgtaggctgtacctcagtggcagatggtagggttcaagagaggacactagccatcaggagagggcaagcaggattgctataacccagtgctcagggagtagagagccattgctttaaaatgtaaatagccaaaaagatagcaccctaatcaaccgtttgtgtagcagagtgagccgactttcagcaggcatctggcttcaagttgcaaaactacctcatatcatgaagatgggaaaagtttattttatcactaaatataaccaattagcatacatgaatggcctctccagttaccaggtgagttcaggatgaactatgtatgacatggtgctatatattcttctacttgtggactaattatggtgaccactaattatggtgacagactaattctgtctttgcaatctgttaagcagattgactgtgatgcatgacacattctcgattaattgtgtaataaaacatcattcttactgttctgtcattgtggtgtttctctggggatgcagaaaatttttcttttaattatattttccaaacactgtcaagaattatcagacacaataaaaacatataaggtgccaaccagaatttactatagagaggactttccctctcaggcttccagtcaactaacaaatttgctgcaaagtgcctgctttctcttaaatatgcaggcagaattatgtctctgcctgttagatacctgtagttttctatagtcacttctagagagactagaccagatttctacagacttgacagggcaacaatcaaccattttacctctttctatgactcttgtatcttcagtcctgaaactgactcacagaccctggaccccaggtacccaatcagagtaacgtgtgcactgagtagacatgtggaaatgagagtctccacgttcccctttctcctcttgctaaaatgcccacaaatgtgcaggtaccacctgctgctactctatccatccagagcctaaatctgcagctccaaattctgaatctaggtcttgagatttggaaaataaaaaaaaacttttctctgaggaatgcaagtctttttagttgtcaaactcagagagagattaaaatgagagcacatttatgtccttctcccctttttgaataatgtacttatctcttgaaagcatttgctattgccaccagtagctataacctaaactaataatgccactctggacactataattcatactgtaaaccttaatgatgtacatcgaatcaataatcaatgttatttctgtaaataaataaaaatttctgataaatttgtaccagccccatctctgtccatctttttttggctttacaaatccacttgtaactgttgctaaacaaagtttagatttcaggcaacttgaatctttgctcccaggttataatcctcaagcttggcccaaataaactgtctacatatattcatgttacctcagcttatttcttttaggtaggcatattatttagaatgtactagagcagcctctatgaggggatttctcttttgactgtactccacttgctgtcacacccgagaatgcaaagccaggctgatctgacatagaatctgcatgtaagatctgacctctgcctgggattcacaaagcaaggtcaggctttggatttagaatgtacagaaaacaaacaggaaacattttctgcatggtgagatgtcaacatagatgtcttgaagttcccatttgagaatgtggctctttgagtttttcaggtcttgtctagtgacctgctgcagttatgtgaggggctccaggtgtaaatagaatctgatggcagaatctataagcgtaaacaagcatcttcagagtaagagattaaggccacaaagtatccagagcctccaccaaactacacctatgtgttaaatgtgatactggagtagagtattcttgtcctttgtttgtttgtttgtttttaacccaaaagctagctaatcaggatgggtgattaaagttctggagcttcaccagggcagttcaatttttcatttagcctgagtgtctcttcccggacttatcaatgggccatcagctcagaagcactgggaacctctcacaatcaccaggacatctactagaaatttgaaaatgtccaaaacagaattgtgtcgagctgacaaaagtgtataattctgcttttgttcagtttaagtaaaatagtttactctgtgttttcctcccctcatacatgagatatctttggttggtacccagatgagagtttctccagtttcctggtacttgagtgaaaaacaaggaagatgtctggagactcaaacagatcaactaatagtttccatttcatatgaccattagaaaaatagctgaagtagttatggcccctaccatccaggaaattttagtctaggccatcaactagagaaaatggctaatttgagcatcatatggtgggtacaatgaatagatgtgtgcaacaaaacttgggctttatttgggtcactttctttatattgttgcgacttctgatgttatcacctaaagggatatttatggagagaagacttattatttctgttctttttaccttgctaggaatacatatttatcttcaaataaaattatcctagaaaactttaagagatttgtttaaattgcctgttagtatgtgttataaaattaacagggcagtggctaaaaaagattaaagttacacaaactctgggatttaagtttctcttaggtaagtttacaaaaacagaactcaaaatacccactgtcatagagaacagaattctgcttaggaacctctccctgtcccagttctgtttagattcaccctctatgaaggccttactaaggtctggcccaaccctggagttttgcctcacagaactgataagaagagatgagagttttgaatccttttgcctctctagagctgatgctcaaaattttttaaaaatccaaaagcagatgaatgggataaataatgtattttaggttcttaatttattattattattattattattgagatggaatttcactcttgtcacccaggctggagtgcagtggcgtgatcttggctcactgcaacctccacctccagagttcaagcgattcttgtgcctcagcctccaaagtagctgggattacaggcacccgccaccatgcctgactaatttttcatatttttagtagaggtggggtttcatcatgttgcccaggctggtgtccaactcctgacctcaggtgatccacccacctcagcctcccaaactgcagggattacaggtgtgagccaatgtgcctggccttttttaatttttttaaacagtgctagcagagacagtccaagtactacttgttctctatttctgcagatccagtagttgttccacaagtcacaaaaaaagtaaatataaacacaatacaaattctgctaaactatacaaactctttctatatccctttcacctgtctatatttaagttttattctatacatttaaaaaaagtcaatgacagataatcagaagaagacataaaaatgctagcccccccctctctaaaatctgggaattattaaagacagtaccagggaattattaaagacagtaccagctcccagggtgttatgaggattaaatcacaaagtacgttatacccagcacagtgctctgtaacatactcttgagcacatagtacctgcttaataaacattgcattagtacatgtgcacatgttggtttccaaatgtaaatttattcaaacgttgctgacttctgtttgttctgtaaactttaaagaaccagcaaagaataaggaaattggttgtcttcatttgtcctagaagtatgtgtgttgtgacgagggtgttcagtgtaagggactctttgctgtgcctgctttctctaattactgctaatgatgagcccaggggaagcaacatcagcattaacagggaacttgtgtaaaatacccacttacagacactttccaagcctgcaggattatatcacacagagtggggccaaagttaccacgtgattttaaagcttattaaagcttgaggggcaatgcttagctaaatggttatcagcccatgtttctagttaggattacatggttaatttgccaaaatctctttacttatgccttttttattttacaggttctatttattattctgagtagaagcatccatgttgtttaaattaagtgcctcatgtgacccttaggtgaggccagaatcaagtatgagaggttcgagatacatttatgaaagttaagttccacctttgaactaaagggtggtcacagggcctgttctgtttggatttggtagtgacaggaaagtgtagctcatattttcattactgtagcagaaattgatggagtctgttaaaagggaggtcacctgaggacaggaaagaagaagcttttacttttatttccatggagcagctcatcattcctgagtctttattttaatataaaaaacagaaatgggtggactttttttgcagctctgggtccttctgcttgtgggcgtggtggtagtaggtgaacatgtggtgctgacacctttaaaggcatattctccagatccaggtgtaatttgtccggagaatctcatctgaagtgaatttccagagaaggagtagaaagaggaaaaaatgactttttttcagctaaacatgcctcagataaagagctgtgtccactctgcctcctggaatgccgtgctttcagtacttgcaaaccttaatctctctacttgtgttttttctccctaataagtttgttttaagtatgttttaaattttttatggtagtcaaagttctctgaaaaatatttctttcctatataccagagctttctctacattctctacatcatggcttcttatatgccatgcaaaattctcaccaggaatttatggtctgcaatattaaaaatgttccccttgtggtgttgaacatgggaagtcacggatactgaagattcctattgggaaaagctggggtccttagtaaagatgaagaacatctaatgttgagattccatctgagctcccccttagctctatgcagaacactgtttagaaaatgctgatttaaacaagatggtatttattacacaaaaacttctaaaaaatttattaggagatacttgctattagagtgttaaagacagactatttaaaatcactactaaaaatgacaaattttcgaggtaacttctaactcaacatatcttttacatctgaaacatatacataactgattctctatgatgcaagtagaacactgaaaagtgtacacatttgtgtttatactttatcatccagaaaagtattatagatacactggtgttgtggatcttatgccattctcttttctcaggattagagatattaggaaatatttctgtgtaaataaatattttattggataatttcagtcactcctgtaagtcagaaccagttctttttactctctcattttgcctttagtcaagttataaattttgctggctacctggtgtgtgtgtgtgtgtgtgtgtgtgtgtgtgtgtgtgtgtgtgtgtgtgtgtgtgtatgtgtctatgtgtgagtgtttgtgtttttcagggactgttgacatttacagatgtggccatagaattctctctgatggagtggcaattcttggacactgcacagtggaatttatataggaacgtgatgttagagaactacaggaatctggtcttcccaggtgatgacaacttcaacacacaattccaaatataccctaatggtttcatttctcttttttgtagaatgtgttttggtaatttatgctttgcataaatgagtttcagatctgtgttttcaagaaaatcttggggatttgtccatgtataaaataactttttcaggatgtttcatcttgacctgaaatttccacattcctgagctgatctgtgtcctttactctagattagcagtaatttcattaatttagtgacataaaatattgttgtccataacttaaaatctaattgccaacaccaagttttgactcagtattactggatagtgaaattaataacctacaaatttaaaatatttaataaaattccctgttagaaatcagtattttgtgattactttatgaaaatattttattacaccctcttttctgaacacagaagtaggttggtaactggagaatatgagcaaaatttacattattcatttgtaatgaaataggtattgctgtctctaagccagacctgatcatctgtctggagcaaaaaaaagagccctgaaatatgaagagacatgagatggtggatgaacacccaggtaggtgagagtgaaggtgaatacaatgtttaacacaaatgagaggtctaaaaattaaggagaaagccagttgttaaaatatgagttggaaagctgtgttttataggaaatagtttctgggaagcctaagggttttttgtttgtttgttttgttttgttttatctcaaatttggacatcttctgttttatgcttttaaattttctaaggattctgctttctttttagtgatcttctttcaagttttcagtgcgagccactaccctgttcatggcatataaaaaactgcacagtctgactacttttacattctttttgggaacacacaaatctgcataattttaagaaactctgtgttaaacaattttttaagttttctttttgtatcatgtgtaaaatgtgaattgtagtttctgttccttttttttggttcatttttctgcacatttcatcttgtttatattactatagtcttcaaatatagtttgaagttaaaaagtatgatgccctgtgctttgtttttatttttaagattgctttgactattcaaagtttattgcagtttcatggaaattctaaaattgtattttccattacttaaaaaattgccactgaaattttgatagagagtttatcgaatctatagatcactttggataacacggcactttaacagtatttattttttaaatgcatagacatgaaatatttttaaatttatttatgtcttttctaatttctattactgatgtatcattataaagactttttacctcctttgttaaatttgttctcagaaatttatcattttaatgctattgtaaataagattgttttcttcctgtattttatcagagagcttgtcttaagtgtatggaaccctaacttgtaagttaattttatattttcctaatttattgattgtatttagtagtttagacaggttttaatgtactgtttatgattttatatacataggatcatatgatctacaaccagcaactttttacttgttttccatttgaatggctcttttttatttttcgactaattcttctgccacatactttcaatgctatgttaaaataaaagcattgacaatgggcacaatatagttttgcgttggtgtatgtgaatttgaaggagcaaagacctcttcaagttttttaaactgctttcaggaggtaaagatcatcttttgttgggcccccagggtgatgggatgccctctgggtttgtagtaaagaggggttgcagcttggtcaccaggctgctggatctgcactagggtccacctttagctggcttgttacaaggggatttggtagttgtaattcccattttatattttggatagattgaatttcttttggtactttgctctgtagggcagacactagtgcaggtttctgcagtccagtctgcataaggtgggccttatgtcaaaatgtggatgagtacagctttcactgagtaccagaaagaatttttccaggtcattgtgtgggttcctaggtaggcagaactggccattaactgtggctcatggagctgaaactgagtcattgaactgcttcaagaaccatggtaaaggccaaggtctgcaggcctgcctgcgtggctataaatgaatgtcttcctccaggcctctggaagggcaggacctctctcagattgtggctggaaggagtttgagatggttacaccgtaagttcagaattttctgttgtgccaagctaggtaggccacttcctagtctgtagttaagaacttcctagtctgtagtttaccacctaaataagggcctgccttctgaaaagaagacttttcaatcttgggctttatcagatcttcacaactccctctctggatctcaaagctctcttaaaggcacttatatttgagatggggtcttgctacacaatccaggctggtcttgaaatcctggcctgaagcaattctctaacctgaatgtaccatgtagctgtcattacaggtttgagccatgagggcctggctctctcatgtaggtatttttgtgagagatggctgacaaattatcttgctgtgcagggagtaagaaaatagggtacccttccttcttccatcttactgatttcactctctttatacatttttattctttattttctattacaaatttgtaattttagattcagagatttagaacaatattctagaatttacatgttatgcctgaagtaaattagataattagtagacactccatatttactaaaacagttacttataaatttaagcttgctgtaggcaaaaaggaattataggatttgcacccactttttcagcctatatctaaataatcacataattttctcccatatatttgttttaggctctaaccatattctgcttacatttagcaatgtaaggctattctttgcttctaaagttgggtcacagcagttttattttgtgtaagaatagcatatatttaaaacataaaaattatttctagttttaaaaaaatgtttaaagtttctcatgagaatcttttatttatgactatactgcaatttctctgaaattttacagccatatagtgtatgtcaatgatttaaaatacctgccttccatgagtacacagttagtcaaatactgtagttatctagacaaatcctttcttcatagtacatcaatattgcaaaccagaatttatgaataaacatttctcttattattgttttccagtctatattggtgttttataatgttggtttcttaacatcagtttattgtgggttttgattttacttaggtactataatattagacaatttgcaattctatttgtacactttaagtcaatgtggggtttaattataaatcagccatatgtctatcacaatcagattatatacatgtgtgtgtatctataaatataaccctaatttttgttatggcttatcttgtatacattctctcttagctgaatggttgttttttcttgtccaagtgaaaagtcaaggaaatagtcttattttcaccatgtgtttaatgatgaatatatatgtcctttgtgtgagagaggcacttttgtgatttgaaggtaatttttgaaaaaaattataattctgtattttttcagtttttctttgaaaaacattgttgtaaaaacataaaatttaccatcttaaatctattaaagtgtacatttcagggctaggcatggtggtggctcacatttgtcatcccaggattttgggaggtgaagacagaagaatcgcttgagcccaaaagtttgagagcagcctgggaaacatatggagattctctctctacaaaaaaattataaaaatagccaggcatggtggtatgcacctgtagtctcagctctttaggagattgatggtggaggattacttgagcctgggagcttgaggctacagtgcgcctcaagcttgggtgacagtgagaccctgtctcgaaaaaagaagctgtacatttcagtattgtttagtatattcatattatataaaagagttccgtaaatttttcattttgagaaactaaaactcaatactcattaagtaacaactgcccattttaccctctccccagcccttgagactcatagaaacaaaacacccttccatgttttgtttctatgagtgtgactaattaagatatctcatataagtgaaatcatatagtatccatcattttgttactggcttatttcaggtaacatagtattatcatagtttatcttaaaatatgacaggatttacttaaggctgagtaatattctactgtgtgtgtatgtgtgtgtgtgttcgtgtgtgtgtgtgtataacatggtttttgatgtgtttataagtcaaggaatatctaagttgcttcagccttttagcttttgtgagcactggcacaaaaaacacagatgttcaaacttgtctttcaggtcctgtgttgcatattttggatataaattcataaatgagattgctgtatttgatgatacttttattttaataacttgaggaacatttatacattttgaaataatgactacatccttgttttccacccacaatcaacatgactgtcatttttattgaatcatcaacagatttggtatttctaaaaaattgatatctgtcattctattaagtataaggtgatcttgtttttcaatgtaatttttattcatttctttacaaatggtaattctgcatgttttttcaaagcgttttcccatttgtgtatttttttgataaaaatttagttcaattatttctaaatcaagttattcaacttcattgttcagttttaagagttgcttatatacttttaatattaattcctatcatatgtgatttgcaaatactttcacccactttctgaaaggcattgttactctattgaatgttttcattgacatgcagaaattttggagtatagtgtagttaaatttttctttttttctttgttgctcatccatttaatgtcgtatctaagagaatggtgccaagaccaatgtcatgtcttctccctatatttttttctaagagatttgttagttttttaatgtctaagtattttatttaaaatacttttcatatttggttcaaggaaatgatctaactttattttatcggtgttgatatctagttttcaacattatgttttgaagagattagcttctctctattgtgtgctcatggcaactttgtggaaaatcatttgattatacgtggaagggtttatttctgggctctctattgtctttcacctgtttatctatgtgttagtaccatattgtttgtcttatttagcttttaatacgttttgaaatcaggaaatataatgcttccttgttttttaatgggtgtttggctatagtttatcattaaattaaaaaattttaaacaatatgtttgtaaaaaattgtgctattcagatttttatagagattataataaatctgttcaccactctaggttgtatcgacatctttgaaggattaaatatttttaccctcaagccaagaatatgctaaagagtgtgttttattttcatatatatttggatttgccagttttacttttgctcttaatttcttgtgttattcagttctggtcagagaacacatatgattttggtcttcttaaatttatgtcttgttgtttgaggcaggatcttactctgtcactcaggccgtagtgcagtggaataattttggctcactgcagccataacctcccaggctcaagtgatcatttcagctcaatctcccaagtagctgacactatagcaatgcattaccctgcctcactaattttgtgattatttgtaaggacagggtttcactgtgttgcccaggctggtctcaaatttctggctccacatgtttctcccatctcagttttccaaaatgttgagattataggcatcagccactgcacccagctggtattctcaaatttaataagacttggtatgtgtcctaacagaatataccaggcacaaataagaatattgtgtattctcttgcttttgattaaaaaggtttgtatatgcctgttaagcctgattggtctgcaatattgtttggatttccatgttctccaaatcttatgctgcaatgtaatcctcagtgtttaatgtggaacaggtgggaggtgtttgtgtcatgggggcaaattcctcatgaatggcttggcactagcttgttaatcaaagtgtttacactctgttaattcaaagattggttcattaaaagaacctggcttcattatctcacacttgctctttgtcttaccatctaatacgtcctgttactctttgcctttcacctaattgtaagcttctgagattctcaccagaagcagatgctgacacacactttttctacagtctgccaaactgtgagccaaaaaaacctctttgcttgatgaattatccactctcaggtattcctctctgcaaaacaattgaatttggcaatttgcttctagaggcattatgttatattggggagcagaaaaaccgtgttgggtaaatataacagacttttctttttcttctgtgaggttctttatattgtgctcacctgggacactgtccacacttaactcatttataaattttccacaaaagtattttggtcagtatgattttgttaactttatatgtctaggaagaaattatggtctgtggtattgtgctatgtcatcttgcttatgtagtttgtgtaattttatagattagacttagaaagtatattagagtctagcaattaaagtaatgtgttatttttatttctttcagtaatgtgttctcatttcacccaagactttttgccagagaagaacatagaagagtctttgcacaaagtaacactgagaagatatgaaaaatgtggacattaagaaatttctgttaaaagaaggctataaaagtgtggatgagtgtaaggtgcacaaagaaggttataatgaacttaaccaatgtttcccaactacccagagcaaaatatttcaatgtgataaatatgtgaaagtctttcataaattttcacatttaaaagcatataagataagacatgctgataagaaacctttcaaatgtaaagaatgtggcaaatcattttgcatgctgttacacctaattcaacataaaagaattcatgctacagtgaagttttacaaatgtaaagaatgtggaaaagtctataacagatcctcaacctttactacacataagagaattcatactggagagaaaccttacaaatgtgaagaatgtggcaaagcttttaaccagtctacaaaccttactagacataagagaattcatactgcagagaaaccctacaaatgtgaagaatgtggcaaagcttttaaccatccctaaaaccttactgaacataagaaaattcatacttgagagaaaccgtacaaatgtgaagaatgtggcaaagcttttaaccagtcctcaatactttctaaacataagaaaactcatactggagagaaaccctacaaatataaagaatgtggcaaagcttttaatcggtcctcaaatcttactacacataagataattcatactggtgagaaaccctacaaatgtgaagaatgtggcaaagcttttcaccaatcctcaaaacttgctaaacataagaaaattcatactggagagaaaccctacaaatgtgaagactgttgcagagcttttacagactctgcaacccttactagacataagagaattcatactggagaaaaaccatacaaatatgaagactgtggcaaagcttttacatattctacaacccttactagacataagataattcatactggagaaaaaccatataaatataaagactgtggcaaagctttcaacgaatcctcaatgcttactacacacaagaaaattcacactggagagaaaccatacaaatgtgaacaatgtggcaaagcttttacagactctgcaacccttactagacgtaagagaattcatactggagaaaaaccatacaaatatgaagactgtggcaaagcttttacagactctgcaatccttagtagacgtaagagaattcatactggagaaaaaccatacagatgtgaagagtgtggcaaagctttcacagactctgcaacccttcctaaacataagagaattcatactggagaaaaaaaccatacaaatgtgaagactgtggcaaagcttttaacgaatcctcaacacttactgcacataagagaattcatactggagagacaccttacaaatgtgaagaatgtggcaaagcttttaaccattcctcacaccttactacacataagagaattcatactggagagaaaccatacaaatgtgaagaatatggcaaagcttttagccaatcttcatcacttactaaacataagataatttatactggggagcaaccttacaaatgtgaagaatgtgacaaagcttttaacctatctgcaagccttattaagaataagaaaattcataccagggagaaactctacaaaaccagaaagtgacaatgattttgacaacacctcaaaccttttctaaatataaaagaaattgtactggtgacaaatcctagaaatgtgaagaatgtgacaaaacctttaaaagattgtcccacttatttttaagtaagataatttttactggagaaaacacctacaagagtgaacaatattgtgaaatttctaattaatagtcgcaagttattgcacaggaaagcatttatacttgagaaaaattgtataaatacaaataatgtgaaataaccattaatatctgctcacatcttactcaacgttagagagttggtaaataataaaagcattataaatgcaattactgtaaaaaaatgtcagcctttaaagtgaagaaaaggctgggcacagtggctcatgcctgtaatcccagcactttgggagtgctcaggtgggtagatcatggggtcagtagtttgagaccaacatggccatagaaaccccatctctactaaaaatacaaaaatttagccaggcatgttggtacacacctgtaatcctagctactaaagaggctgaggcaggagaattccttgaacctgggaggtggagattgcagtgagccgagatcataccactgcactccagcttgggtgacagagcaagactccatctcataaaaaaaagtgaggaagagtattcattctgaagacaaagattacgaacataaagagggttgtagtacccttacttgtatcacagattttattgcacacattttgtactacaaaaaaaccctgaagcaatttctcaaacttggctcaacatcaggaaatttatgttgggaaaaaaatcttgcaaatggcaataaatttggagaaaaattgtttcaataactatttcttagaaaacaccagaggtttcatactaaaatatatttttgcagatgcagtacataggaaacaatgtttaatccaaaatgaaatcaatgtaaatatcagaaaattcacagtagaaatacctaaggcactgaagctgtagacattacactaaatcagagtgctaagtatagaaaataatctagaactaagttggtaaataaattatttgtacatcactttaaaagaaatagaattttttaaatgttataattacaagtatactttggtccttaaaattagatattttaaacaagaataatgatgcaattctactctcaaattacttcatgctctattttccttcctactgtattcacctgtgaaagcatgttactaattgctgcatcaaaaatataagaggtttttttttattaggtgggcattatttatgaccttttctatggaagagaaaaggcattataatgtaagacgtgatgaaattgtaagtggagagactctttttagttaacacgtagtattaagtaatgcatgagttagatgttcagagtaatattctacattatggtgataacatttttaattttagttaattaaaatttattagtagtatatcattttactaatagtacttttatgtaatagaatatagtacattattaaatttttagattaagtgtgaacttattttttttttgagacagagtttccctcttgttgcccaggctggagtacagtggcacgatcttagctcactgtaacctatgcctcccgggttcaagtaattctcctgcctcagcctcctgagtagctgggattacaggtgcccgccaccatgctcggctaatttttttgtatttttagtagaggcagggtttccccatgttggtcaggccggtctcgaactcctcacctcaggtgatctacctgcctcagcctcccaaagtgctgggattacaggcataagccaccgcgtccggccatgtgaacttaaatttttaaagtttgttaaaaccattgtgcattcaataaagtgttattatgccactaactttaatctattcaaccttactcaaggatgtaggtaaaagatggtaacaatatactatttggtaacataatggactaacatttctagtaatctcttttgccagtgactttaaagtgcgaagaagttaaagaatattgtttccataggttaaatatttactcgttttttcttattttagcttatttgtcttaatttttgtgagtacatagtatgtgtaggtatttatgctatatatagcctatttggatacaggaataaaataggtaataatcacatcagggtaaattaagtatccatcatctccagtatttatcctttgtattagaaacgaattctacatttttcgatattttaaaatgtacaattaaattgttattcactacaaggtcatgtttatgatcataataaaagttatatacaattataaataaaatccatacatttctgagtccaaaataaacattaaaaattgttacatatctttctttgaatatatgacatctctgcctgcaaacacatacagacttttagttttgatttacatagagttaaatatacacatacattactctaaagataaaacctaattttcttaggtttaagaaaattatggagtaagtaagcatgtttgaatgagtttgtacctattttcagaagaaaaaagcaatattggaagaaaatgaatcattttaataaggtgactagaagactaaaaacctcaaaaatgctaaaagcaaattgataccctctgctttttattgaattgattactgtaaaatcttacagctaatggatcagaatctccttatgcaaattttttgtctttatttgtctggtactcatgctagacccataattttcttgtttctcataatttttcccttttatagcttatgagattttcattatgtgagctggtcgaggattgtatgaatgatttttatacaacttagtagtgcacagaaaataatttctagatgtaattccacaattcgtttattaagttatattttattgagttagaacattccatttagttcttttaactggagaaccctatagaagcctactttttttaagttattgttcctttcactttttataattgacagaagtaaaattgacctattgatccagccagtttgttcaggtaagtactagggaagtttcataagtcatgaggatgtttatatatataaatatagcaaacaaacatggcagtgtaactgatgctccatagaaaggcagaaatattcccgtgaaagttagtttcaacttcatgtaagagatagaaaatattaatggtgaacaaataactaattcttcatgtgaagagtcatttttttttcaggctgcaaagctggatcttgctgaatttaaagaggaattttgcttcttttatattcgaattatctttagttttctttgtctaattctgtgtttttcaactgtgtgtgcatcacagcccttctttgtctttttctgttttatggctacaattttctcataatcattttcatgccatgtcatttaggatggtaatttgttggttttgataagaaagttggtatttttaatgcactttaaaaaatggttttaactggagagtttgcttatgcatatagctttcaaatgagttaattaagataaaaggcacacactgttcacaggtaagagaattaaatcagttagcatcatttttctctgtacacagaaaatctcattaaattcttacaaagtttggcaagtataaaatgtgctaaaatatatatcttagaatttaaatttttaagagctaataagtgaattgtaaatttaattttctatgatatagaacaatgtacatttccatgcagaatcttctatttttaagtgtaatgttaaacatttcaaagtaataaagtgacctctgtagatttaaaatttggaataatattttttgcatattgatattacaatttggggaatttctcactcttatatcagtttttttggtgggtgaagtttacagtttttattcttaatcacctaatggtagacaactttttggtcattttctctggaaaacatttggagatcatgtcagattttggattaaagctttttttaattatttcgtatgcaaacttgtttactgtgttctgagtggccagtcatgagaccataagcaacacctgccctcttagtgtcttttgtaccatctgtaatgaataaatgtaaatttattctgtaaaacatgacattttgaagtatgtatatacattgtcaaatgcttaattctgggtaattaatgctttacctcatatagttagttaacacttttgtggtgagagcacataatattgtctcagaattttttaaaaaatgcaaatacattattattaactatagtcactgtgcagtagaaaaaaatttttgaacttatttctcctctccaactatagttatgtattctttgacagacatctttccaaacccccctttcttctaaatactttgatatctattgatcataattttactccctacttcagtgagattaagttgtttagaagccatgtataagtaaaatgaaataattatctttctggctcttatttcaattaatatgtactctaggtcaatccatgtaattgaaaataataaaattcgcttttttttttttttgagatggagtctcactctgttgcccaggctggagtgcagtggcatgatctaggctcactgcaagctccacctcctgggttcatgccattctcctgcctcagcctcccaagtagctaggactacaggcgcccgccaccaagcccagctaatttttattgtatttttagtagagacggggtttcaccatgttggccaggatggtctagatctcctgacctcatgatccgcccacctcagcctcccaaagtgctgggattacaggcgtaagccaccgtgcccggcctaaaatttgcttttaaaaagatgaatagtattctcttgtgtatatacaccacatttttgttttgttttgttttgttttgttttgagatggagtctcactctgtcaaccaggctggagtgcaatggtgcaattttggctcactgcaacctcagcctcccaggttcaagcgattctcctgcctcagcctcctgagaagctgggattacaggcgtatgcccccacgcctgtctaatttttgtgtttttattagaaatggggtttcaccaagttggtcaggctggtctcaaactcctgacctcatcatctgctcgcctcagcctcccaaagtgctgggattacaggtgagaaccactgcacccagcctaccacattgtcttgatgtactcattagatactgaacaattgattctatattttggccactgcgaagagtgttgcaaactacacagaagtacaaatgtttctttattctaattttatttgtttgagatatatatccaatattgcaattgctgtattgtagtttgattttaaactttttcaggtatctgtattttgttttccataacggttgtcatttacattcaacccagaatgtggaagaatttccttttcttcccacctttgctaagacttttttttttaaataagagtaattttaacaggtgtgagttatttcctagggtttttttttttcgctttcctttccctgataataattgatattgagtaattttgtttttgagacggagtctcactctgtcacccaggctggagtacaatggcacagtcttggctcactgcaacctctgcctcccaggttcaagtggttctcctgtctcagcctttggagtagctgggattacaggcgcctgccaccaagcctggctaatttttatatttttagtagagaaggggtttcaccatgttggccaggctggtctcgaactgctgaccttgtgatccacccacctttgcctcccaaagcgctgggagtacaggcatgagccactgtgtgcggctgatattgagcatttttttatacatctcttggccacatgtatgtcttttcttgaaaatatttacttaagacttttgctcatgtttatttgtttttgttgtatagtcatttgagtttcttatatatttttgacattaactccttgttacctgcgtgatttgcaaatattatctcccatttttcagttgtttaattttggtgattgtatcagattgtgggcagcattttaaaaatttcaagtaatctaactcatcaatttttgtttgttttctggaatttgaagattaaataaaaacagtcactgcctgttatggggctttcactctatttttttgtagtaattttagagtttcaagccttacttttaagtatctaatttatttagggttgatttttatatgtggtatgagatgcagatcttgttttattgctctaaatgtagctataaagttttctaaacaccatttatttaggatactgtccctaagaaattgtcacctatttatataatcacctatttatatataactgatataatcagttagctgtaaatacatggatatgtttctgctctctcccttttgctccattaatctatgtgtccacttttattcaagtaccatacgtttttgttattatagctatgtagtatatttcaaagtcagctagggtgataccttcagcctattttttctttactgttttgactattgaaggtcttttttggtactgtatacattttaaatacgttttaaaagttatatttagtatgttgctggtattttgatagaggttgcattatatctgtagatcattttgtgtaatgcaggtatttaacattattaaaaataccaattcatgaataatattttttcattttgtattagtttattttaacgttcctcaatttataatgtaaggtgtttcaaatttttgtttaaatttaattcaaagtatagttactatactttataactaattccaagtatagttattatagatgagattgttttttattttattttgagatagttaattgttagtatattgaaattctactgacttttgtatgttgattttgtatactgccagttcaataaattggtttactggttctactggttctcagtaaagtgttaggcttttctctacttaaaattatgtcatctgcaaacagctataatttttttccaatctggatgcctttgattttattttccaatttttctgtcttggacatttagtaccatgcttagtaagactgaaaagcttataacatttccatgtttagtatgttaactgtgcaatttttgttataagcagcatttattaacttgaggtgcatttgtcctatacctaattttttcagagatttattatgaggaaatgtgacttttgtcaaatttttattctgcatgtatctaaatgttatggatgtgaaatcacaatttatcccacttaaatacaaaacatcttcggagactactatgaacatctctatgcatgcaaactagaaaatttagagaaaataaatatactcttgatatacaaaacttcccaaaattgaatcaggaaggaacaaaaatcttgggcatagcaaaaatgtgtaataatattgaattagtgatataaaacccaccaaccataaacagctctggatcagacgaatttacagccaaattttactacatataataaagatgagctggtactaatcctactaaatgtattccaacaatcaaggtggaaattatttctaacttattatatgaaaccagcatcattctaataccaaaatctagtaaagatacaacaaaaaagacaactataggccaatattgttggtgaacataaaacaaaaattctccattaaatactagcaagctgagttcataagcacatcaaaaagttatttttccacaatcatgtgagctttacttcatgactgcaagaatgtttcatcatgtgcaagtcaataagtgtgattcaccagtaaagatgattaaaagcaaaaacttattatcacagtaaatgcagaaaaagcattcaagaaaattcaatattcattcataaaaatattcttaacaaaccagaaattgaagaaacgtacctcaaaataaaagccatttatgacaaaactttatttgacatcatattgaacaggcaaaagctgggtgcattctcaataagaagaaaaataagacaaaaatatccactctgaacgcttttatttaacatagttctggaagtcctagccagagcaatccaacaaaatagtgaaataaaaggtatccagataggaaaataagtcaaattgtcttcacagaagatataattctctacctgggaaacttcaaagatttcccccaaagattcttaagcctaaaaaatgacttcagcaaattcttaagatagaaaatcgacatacccaaacgagtaacatttctgtataccaataacattaaaatcaagaacacagttctgtttacaatagccacaatcaaaaaataatatctaggactacattaaatcaaggaggtaaaatatctctacaaggagaattacaatacactactgaaagatatcagaaaacacaaataaatggaaaagcattccatgctcatggattttgaaaactcaatataatttaaatgtcctaaagcaacgtacagattaaatgctatctctatcaaactgtcaatgccattttttataaattcaataaaactattataaaatttatatttataataaaaaagcctaaatagctaaagcaacattaaaaggaataaacctggaggtgtcacattacctgacttcaaactttactacaagttacaataaccaatataacctagttctggtacaaaaatatacatatagaccaatgaaatagataagagatatctgaaataaagctacactcctgcaaccaactaatttttgacaaagtcaacagaaataaaaaggaaataaatccctatttaataaatagtactgggaaaacttgttagtcatatgcagaagaaaattagacccttacctctcattatataaaaaatataacttaagatagattaaaaacttaactgtgagacttcaagctatataaatgttaaaaaaacacttagtactctagacactagaaagaatttgtagctaacactataaaaatgaatgcaacaaaaataaaaatagaaaattggcacctacttaaactaaagagctgcacagcaaaagaagctattgacaaagagacatcctacagtataaaataaaatatttgcaaattgcaaacaacaaagaattaacaaatactatctatcagaatttattaaaaaacagacaaataatatgaatagacatttttaaaaggaagacataaaatctgccaataaacatgcaaacaatgctcaacattcctagtcatcagagaaatgtaaatcaaaatgacaatgtgataccatctcacaccagttagaatgacttattaaaagttaaaaactgacaaagacaaaagttgtggaaaaaagggaatctttatatactatcggtggaaatgcaaattaattcagcccctgtggaacacagttcggagatttctcaaagaactacaaatagaattgccatttgacccatcaatacaattactgagtatatatccaaaataaattatttgacacaaaagtcctgcactcacatgtttactgcagcactattcacgatagcaaagacacagaattaaaccaggtacctttgaatcttagatccatgttgctgcaaggaacatttttttttttgtggctgcatagtattgcatggtgtataagtacctcaaataccacctgttctcacttataagtgggtgctaaacattggacaaatacagaaacaaagatggaaataataaacactggaagttgtttttttaaaggaaagcattgaaaaactacttatcaggtgtgatgtacactacttcggcaatttttactaagtgcccaaaccttaacatcttgcagtatacgtatgttacaaatcttttcatgtaccccttgaatataaaataaaaataataaaatgtcctgtggtataatgacatgttacatttctccagttctggggtggtaatttatattagaggtgaaagaaacaaaattatgctccctttgggcattggggtgaatgtttctccaggtctgcccacatcctgaaagctaacatatctgaaaggtcttgccctttaacccaagaagtgttttattcccaagtgtgcagctaaaataaatgactatatctttatgttttattttagggctatagggttaacttgttactccactctttttgggaaaatcatggtaagttgtttaatcacatgtcttattttagaataaaccatttttgtaaatgtgaggctgtgaaaattatgttacattcctgaattaaaataaaaacatttttctagtgaaaaaatgcataaaaatcttatggccatagcccaagaaccataaaacagagagtgttggttatttaagaccacactcctgaaaccatttcatcacaaccatactggtgagtaaaggaataatggatcagaaggttctttcagaatacttttcttattctattgcagtgctaaatttttacttgtctttattatttgccatatagaagtctgtacttctaaaaaagatgccatgaatttcaggttaatatgctcacacatatatgctcaccagagcctctagaaggattctggtgtgtttgcaatcgaggtgtgtccattctggcctttcttgtgttgctttgtttgtgtaaaatatgaaggcaagaagtaaagcagagtcaaccaggacatttctagtttctacagcaacagcagctacattttcatgttaggtcaactagaaataatgatagtattccaaaacaaaaaaaaactgatactttatattttttttcttacaatttatagcataaaatttttatagtgtctgaattatagaagttaaacaacttgaacataaaagtgtcatctagataatagtattatttcaatagcttattgtgagtcacaattgccccattgggtttaccggaaaacacttatttatttatttatttatttatttatttatttatttatttattttttgagactgagtttcgttcttgttgcccaggctggagtgcaatggtgcgatctcggctcaccgcaaactctgcctcctgagttcaagcgattctcctgcctcagcctctggagtagctggaattacaggcatgtgccaccacacctggctaattttgtatttttagtagagacggggtttctccatgttggtcaaactggtctggaactcccgacctcaggtgatctgcctgccttggcttcccaaagtgctgggattacaggtgtgagccatcatgcccggcctggagagcacttatttatcttctaagtgtaaataaagaataggttttccataatcctaagcatacagatcttttaagactagcggctgagcacggttgctcatgctgttgcaggaaattaaggaaccagagatactgatagggatgcaggagagcttttattttaggtgtacaccagctcagcagacaagtgtcctcaaagtctgatccctgaacaaagaaagcgagcaacttttaagcgttttgtggtgggaaaaacgtaaagcaggaagcaggtttacggaagtgagaacaaaagcggttaatcattcatgccatgtcttacaacttaggagaaacatgagttgcaactttcacttatctatcttgtgaccttgcagctgcacagcaagaataacagggacttacagaacttacaaaatatgtgggaaagaggtatggttaatgtttcacagacccttagaggcctttagaggagcagttaatattctttttataccttttcttcagggggttacttcacgcctattctaacctaacctaaaagtgtaaatttaatttctttttaattttctacttcatcccccccttttggtgctctatatataataatgtttaatagacagcaccacaattatctagttcttcttgggttggtatatattcttcttggggcgaagcctgatacttagctaatgccattatttgggtagtggtgtgtggccatgattgcctctatagttgactgaacacttctgataagaaaaggcaggagacaagggagaattaggcaggcacctgtgataaggaggaacccacctattaagatcttgaacccatgaaaggtaaaaaaccgtcctctaaacagagaatttggagatcatcttgaccaggtttgaactggaacatgggctaacatctgcatcctggccgtaatttccatgacagctcacctattatcatctatttctagacagcagtttgttgagttaaactttccacatactccttcttctgaggctaggaagtaatctagtgcccgcctgttttgatatatggcattcttcatttgtgtagcttgtacagccagtaaatgtaaagctcttgatgtttcattgattattattttgagcacagtttggagccttatgatacagttgagcatgtaaactggggtgcggtacccccatgactcatcttgtgcccaggtagcaggcccatggtatttgatgattttttcaggaggtcactcattatcttcctagttccctatgtctacatccttttgatgtttgtgtctattcttgtgattatgcttcctttagttcttccattttcatcataaactgattatcttaagagttccccttgctttagaggaattagaaagaaggtggcttgattgttcctaatacacatgtccctgaccgtttagccagcagttgctgatatgcctgcactccacaaatccaatataggccagagggtgctttccaagcatttggagcctctagtggatgccaagaatggcttagaatagagaatcaagagaaaaagtttggatctggtaagcaggagtcattctgggcatttctccatagagtcttatttttagtctcaagataatactgttgccctaggcaggtagccttatggaaggctgcacctttgaaccttgcttgaccaatattaaagtacaaggataaggttcctttgtaggtagatgagacccaggttttatttagaagggctccttctattgacccatcgtgggtctcaaatctccaggcacaagttcaggctcatagcatatataaagctggccatctcctgagtcacaggatgagtaggttgtttggttgtaagtacagaatcctaagagagtcctggtgcattcatagtatgtatggtataataaagttttaactactgtgtttctctccatgtggaatgtatgcaatgtggatatctttctttcaattgtatttctttttgcttagcctcaagtaccactattagtaaaacaagcaagcaaacaaacaaacaatatttttatactagacatgggcaggtaaggtttttccctagacagaaagactggcaataatgatagcatagtaacacggcaatcaacaacactaagacagcaataaaacttaaaatttctatccacatttacttatctgatgacaactccttaagctttggctgagtgtagactactcagcttccagtgtgactagagcggggcttgctattttctcaagcttccgccatgtgtagactggtcagcttccgaagtgaccagagcagggctgttgtcatctccactgacaatgcgatctcgtcgcaggatcagccaggttggatggtctgggtcctgttggctggtccactggtcctgggctgctggttttagccaactgtggtggatttaaggcatgataacctgcaactttaacagcagtgggagtggacaaaattacagtatggggcccttcctatataggtcccagagtagttggattccacttcttaacctaaacaaagtcctcaggtttgaaaaagtgtgctgggtctgccacatttataggcattttttttttcttgcacctaacaatgaatcttttgcatagccagccctaagtcttgcatctgcctttttaaagttaattcccttagttcctgtaggtcacctttaacctgatttataactgggggtggccgaccaaacaaaatctcatagggctaatacccagtttgttttgtggggctgcacctgactcagaggaggaccatgggcaagacctgatgctatcttagatgagtttcttgacaaaatttcttcaacagctgcttgagtgtccagttaatgcgctccacttttcctgagctctgcagctggtgggctatgagtaacttccactttatttttgatagtcaagttaagtcctgaactatttcagccacaaatgctggtccattgtctgatcctagagttagaggcagttcaaatctggggatagtgtctcttaacaacactttgatcacctcttgtgctttctccatctgggcggggaaggccttgacccatcctgaaaaggtgcaaacgaataccaacatgtatcaataaccccccgcttgcagcaatttggggaagtccataagcaggttttcacagggtgtggctcttgtttcttcagttctcggtggccgggtaggcccttgatgagggttgttctgagcacaagtcaaacactgctcacaaacagtttgagtgatggcagtgagctatggcacacagaaatgacgctctaataatgtctctagtgccgtctttcttatgtgagttccttagtggaactatttcaaaaatctgggggctaccatctcaggtatggctagttttctattggagaacttccaccatcctccttcaatataattcccatattcctgggcaaaccaatcccttttattaggagcgttgcttggggtctctgggaaggggatctccgggaggagaagcatagctaaagcttcctcttcagaaggtggatatgtcattgcagcccactttgcctttttgtctgcctttctggtttttgtttgtttgtttttggtgtctaatgttcctgccttctggtgccccttgcagtgcattactgctacttgttttggggctcatacagcatctaagagctgtagaatttttccttatattttatgtctttactttcagcaggtaagagtcctctttctttgtaaatagccccatgaacatgcaaagtagcaaaagcatatttggaatctgtgtaaatatttgccttctggtcttttgctagccagagagctcttgttagagctattagctttgccttttgagcagaagttcccatagacaaagactgcacctctactactgagtcaaaagtcaccactgcataccttgctcggtggaccccctgtagtatgaagctgcttccatcagtgaaatatttaacgtccaggtccctgaggggcctatctgtcaaatttctctggcctgagaacacttcatttgtcacatccacttagcaatgaaggggggcctcctggcactgactcgatgtgaagcaaggtaaccaggtttagggtattcacagtttctaaagttatgcagggacttttacattagatccctttgtattgggttattttcggatttgataactaatggtgcccccttaagtccattaaaattataactcccataacccagtgtggtacccagtttgttagttgttgtcttaaagtcagtttattagcttcctatgccagcaggaaagtagttaattattatttgcagatgatatcttcatttacttacataacaaaagcaactaaaagactgttttaaaagtctattgagacgggtaggcaaaattctaagataatccccaggattcccagtctgttgcacacccactgtgtaattctttttgagtgtaaaaatatgtgtgaatgtggtacgaaatgtctcataaaatttgattactcgtgttgactttgtgtttttcaaaagagacattatcctgattgggctgaacttaatcagaggtgttttttagagaaagagacacatcatagaaaaacactcctgctgacctggaagtgaattctaattgggctatgttgtaagctacttatagtggccacatgacagaaaatatatttgtatattgtcatcattcctgcctcttgcatattgcttctggtaaagagggcaggaggatcccatggcagaggaataaaagaggttcttattcacgcaagaaataattacttctcatctgagatagcttaagataaacagagaagatgacaacatgactatatcaatggcaggagaaagaaaatctggctgaaagggctcactggcattatggagcaatatttagtaagccacagtgagtgatcagcctctgagatatcaacagtccacaaagaaggctgaactcattcttattctgattaaatcagcatgtgtgccctattctggtcgcccagttttaccaccattacagaaattaccatggagaccagtgggcaccctcctagaattaacattatcatgaaaaagcatacctaaatatttgtttttacagttgaaaaatattgaaagcctaataaacttattaataatgaatttatcttctgataattttagaggaattctcctatactgtaatacaatacttagctttaaacacctatatacatatgtatatatatttctttttttttggaagtagagtctcactctgttgcccaggctggagtgcagttgcatgatttcggctcactgcaacctccactttctaggttcaagtgattcttctgcttcagcctccagagtggctgggactacaggtacacaccaccacacctggctaacttgtgtatttttagtagagatgcagttttactatgttggccagcctagtttcaaacttctgacctcaagtgagccacccaccttggcctcccaaagtactgggattacaggtgtgagccactgcacctggctataatataaatgtttcttaactgcatgagcaaatatgtagatagtttcccttagattaacatgataaagttacaattagagaaagcatctgaaattagataaaattaaaaccacattttttcagtggcttggaataactgccctactttatgaaatggccagattactaactagaagcaaagacaagattttggctttgctcaattattaagtccttgaccttttaaaatctaaaatcatgactaatggatttgaatggactattttttaggtgtcttcctaggatttccaaggcaatacaaaaagaattttaataggcaaaaaaaatgcactcaacacacacacattgtttttttctgatttcctgtattattgaaaagttgaagattgcaaatctagtctattaatttagagttaataacaaaagatttttcagtcaagcaaataattgtgtaaaactaatgggtaatggatgctcttagctgccaaataatagtatgactagattcagtaagtatccagccatgcaaatgacagcccaattaaattaagaccctaataggtgcatgtggaaagcactgatgtgcaatatggtgcaccttcactcagcacctttatctgcttgtttacagaaatgccagtttcccctgaatgactctgggtaaatgctaaaccatattgaaaacatggttaacacatttcttctatattataaagaaatttcatgaattttactctgcctcagaaaggcttttagtaaaagagtattcatttatagtattctttggatgcattaaaaatttcaatattccaggtaagtcagagacatttaaatgtcaacaaaattccataaaacgtatttcaatgagatcaagtcttcctagctaaaaattttattttatcagtaaatttagagaaaaatagaaaatcagtactttgggtcaaataacagtgtttggaatgtgagtatcacccagataaatgctcttaatcattattattaaagtagcaatggcaccacgtgctttcctgagacccgctggtctgttttccactgatataaagtgaagaaggcattgaaatagcgaagggaggtgatacaaattgaatactcacataaaatacaatttttaataaaaagcatttaatgttgtacaagtatagatgagactattagtatgaggtcataatatttttacttctattgacagaataactttattcacaaaatttttatttcaaataatattgttttttctgctgtatatttgcaagcttttagtcaaatgttatctgagctcaatagaaatcaacaaaatgaatctttatttttccacaagcattttattcaggcatatgcttatttttcttaaaatatgttagcttttaatgaatgatttatactttttttcagtgtgttgtttatcgctaagaagtggttgtcctcccaggaaactgctattctcagctctacctacattgactaatagtgagaggaagtgatgtgtggataagaagcaaatgtgtcttcactgcatctcttttttaattcgttcactgaagaaaggaggatgctaaaagaaaatgaaagaagatataagccctgaaagatcatgaagaagtcctcttaaccagaaaaaaaaacccacaggggatggtgatgtgagcagaaaatatattattttgctaaggctctgaaatttcagtaaaaaacctgcattgctttaacaaatatattgtttcttcagttttgattcttgaggatacgattcaattcactggtgaatcaaaactgagagaataacatatttgttaaggtaagtgatgtatggaagacccattacgttagaccaacatcttctccacctccagctgcagacaatcatcattccactctctgttgccatgagtttgaaagtttttaactttacacagaaatgaaatcatgtgtgtgtgtgtttcctgtgctggcttattttacttagcataatatccttcaggtttatcaatgttgtatcaaataacaagatttcctttttttttttaagggctgaatagcattccaatgtgtaaatataccacattttctagaagtgttttaattttaaactataaactatgactgttaaatacttttattttcatgccttcttttgattcatattttggctgattgacaaactatgttttaaaaaaatttcttggatcaagattattgatatgggaggggggcatggaggtgttaggtagagaagggtggggtccctggtgaggactctgcccacaggcctgtgcccacggacctaagtgagaacaggcactcttgtttttgcatgcaaatgttgcatttttcaagaccactctggcccaccatgcctccattgctgtgcccatataaaccaagaccttagtgggcacacacacaaacaactgaatgagaggagtagaagaacacagtggcagacagcagaagaaagtggcagagaaaaaggaaagaggcatctgaatgttgagaggagttcagccgagaatggccaaactccaggggaagattatctcctctccctccaccttcccactacagctccccatcctgctgtaagtcacctccactgcttaataaagtctctgcatttatcacctttcaaacagtatgtgtgacctgattcatccagaatgccagacaagaatccaaggcggggtgaacactcagctgttcctggatggcaaggctaaaagagcacactgtaacacacatccattgggctccagcatctgcctgtctgagtgctcctgcttccctcaggggtttgagctgtggggtgactgaacaggtgagccacacccctgttgcacatccttcaaggggaatcagggaactctcttgtttcagccgaaggcttgtctgggataatcatcagcagagtgatttacaaatgtgaaattgttggatgtgcctcttttgtaagaccctgtcacccctctcttttctcgggtaaaagcctttgtttcccttcacagaggtctcattggcacacgggactggagcagagacctggggcaactgaagacatcatttgctggaagactccgacactgaactttgtcagccaggacccccagacttcacttggtgtcttttcttttctcacagtttacagtggctcttatcacttcctttataatgttaagggttttgctacaggctgcagcagtgatattaaataaagtgagcatttggctcagctatcaaaggtacaaatcagagcaatgtggttttcatttagaggtgccatccttactcccaccctggtagccaaaggggcacatggcacaggacacctcctctctgtaccgcctcccctcccagctcaggtgcctggtgtgtccactgcatgcaaaagctgtgcccaacaaccatgaagggtggaagaaaaccacagctgcttctgggaccccacagggctggctggccagtgcttcctgctcaccacaccaacagaactttttaccctggccaaggaatacaaacagtctgaaccaacagaaagatacaatgatcaaagggacctatttgcactgtgcaagggctacctcctcttttgcctttaaactcctttttcttttcttttcttttctttcttttcaagtgaaagcatttccctccccagcacgctgcttctgacagggaagttaacagaggagtgacccctgctggcagataactgtaaatttggcagggctcatttgagacaatctaaacagatagcttcagccccttgaagtatttttagtcccaaatttgattccaagcttcaggttgagtccctagaaagaaaaatcagatctgagggacccaaagccaggcagcaggcacaatgtaaatgggcaggacaaaattctgctgactaaacccccgccccatggaaggaggccatgccccttggcataaatgaggcccagggaactcaaaggttgtcaacagcagggggagatggaggcataggtgaggacagatcattcttttgatttctttctttctttctttttttttttggtttgtttgtttgagagacaaagttttgctcttgttgttcaggctggagtgcaatggcacaatactggctcaccccaacctctgcctcttgggttccagtgattctcctgctttggcctcccgagtagctgggattacagggatttgccaacacacccagctttttttgtattttattagtagagacggggtttctccatgttggtcaggctggtcttgaactcctgaccttagatagtctgcctgcctcggcctcccaaagtgctgggattacaggtgtaagccactgcgcctggcctcagatcattcgttttctatgggccttccctgcttcatagatgaatgctacattggcactcatgggtggcacctgccaaggtcaccaggacttggtgataaaaagatgaaagagaaagggaaaatgcttgctttctctccccatcacaccttgagttttcactgaaagaaggaagggaaatgaggaatgcctgtattccctgtctttcaaaacaagcaagtagctctcttcaccactcctagcttatacttctttggagtgtatcctgaaccattgcaactgccttgaccctcagaatctggaggaaaaatgcttcatagccctctgtacacaggtttggccaaattatgacttacaacaaagactagcttggccttaggaatgaaccattcattctgatgccatgtggctattagaccttttctgcaaacatgagaacaagtggtctgaggcccgatatgtgcaggctttctatatttttcagggcaatcccaacctttgccatcagcgggattgatccagctttcctgtatgccatctcaggagaggctgccaggagcaatctcagggaactaaagaaacaaactccagatgttcccccagcagagaagccagttccctctagccctgctcatccaggccaccctgacctcccaattcagcttcagcctctcacttgccccctcctagaaattctcaccctagacaagccctggtttcactcttgctccttcaacagatgcctggtaaatttggccccagtaaggtccagatccccttctctctacagggtttaaaacatattaaggggaatctttgaaacttatcagatgaccctgaaagacatataaaggctttccagaatttcatccaaatatttgaactctcctggagagatattatgttacttttgaattagaccctgatggacagtgagaagcaagcccctttgcaggcagtagagagatttggggatgagctttgtgttacctatggcatgaggaaagggggcaaatgttattcaactggaagagaagcagtaccagtaaatgaccctggatggtattccaatgatgagatgggagactggatagggagacagtttcaggtgtgcataaggagggcttatgtagggccaggaccaaacatctcaattatactacgttatccatgatggaccagggatttgatgaaaatctcactgccttcttggaaaggctaagagaggccttggtaaagcacacctctctatctcctgattcagccaagggacaactaatcctaaaggataaatttattgctcaggcagcccctgatatcaggaggaagctgcaggaacaggccctgggaccagacagtattttagagaacctcttgaaagtggccacctcggccttttgcaataagtcactggaatagattcttgaattcattatacccaagtaaagacctgggaatctgatggagccacctctgtcaacccagaagagtacccaaagtaccaatgtgaagagatcagagacctccagctaaaaatcacaaaaggtaagtgttaataattaaccttccatggatttcctctttatagtcttgtctatgcttgctgttcttacctttgttctgatctataaccacagggcacaatagtgtttttagaataattagtatatttcactttttatttctgaaatctttggcactaaattctttactagtataatacatgttttacccctgcgtatctaaccttatggaagttttttttctttctcacacctagaggccatcaaattccaaaaaggcaagcaactgaggtctcggacaatgactcccctttgccaggaacccttaggtagacatctgggacaaatctgactgctgtttttctcaaaacaatgccccctattggcaggaagtagctaataccagtggtcatgtatattctaacggcgattagatgtgcctcttcagaggggaaaatgatacgggaggggacaaggaagtgcttggtagagaataatagggtcccttgttagggcttcatcttcaggcctgtgctcgcagatctaagtgagaacaggccctcctgtttttgtacccaaatgttgcattttccaagacccatctggcatgccatgcccccaattatgtgcccatataaacctgagaccttagtgggcacacacacaagtggctgaatgccaagtggaacagaggaacagagtggtggagagtggcagagtacagcagggcggcacagcagaggagggaaagggtgtctgaacgtccagaggagttcagcaaagaatggccaaacttcaggggaagattatcttccccacctccaccttcccactccagctccacattctgatggaagccacctccactgctcagtaaagtctctgcattcaccacctttcaaacagttcatgtgacctgatttatcaaggacgctggacaagaatctggtggggttaacactcagcggttactgagcagcaaggctaaaaaagcacagtaacacacacccacttaggacctagcatctgtccatcgacatcctcccccttctctcaggggtttgagctgtggggcgaccaaacaggcaagccacgcaccttcgcacatcctgtgaggggaatcagagaaccattacttcatcatcagcataattcaagacaaaatggtaatgaaaatcaaccttgattagtgaaacaacaattatctgacccctggtaatcattttcactcccacccaacatgaaagctgcatctctgtgtcacctctcccagttgtaaaaaagaggattctgataaaattaatcagcataaagttttctgacttttttggtctgaaaatttaactgatctcttaccaaaaaagttgatattttacatttatcattttactctattctattaaattttttagaaaaccgaatctgacaaagcatacatttaaaaattaaaaatacttatgaaacattcttatagaaactaaaactaaaaataattttagattcttagagagcatctctcaaatacttcaaattatatgcctttaaccatagatatttattttttattttgctgtgatacagtttggctgtcctttgtgtcaaactccatcatcatttttattctattttgttgtgtagtatttatgttatgcattttatatatttaaaagttgtagtcccggccaggtatggtgactcaggcctgtaatcccaggactttgggaggctgaggcaggcagatcacttgagatcaggagtttgagaccagcctggccaacatagcaaaaccacgtctctactaaaaatacaagcaaattagctgggcatggtggcacacacctgtaatcctagctactcgggaggttgagccacaagaatcgcttgagcctgagaggcagaggttgcagtaagccaagactgcatcactgcactccagcctgggtgacagagtgagactccatctcaaaaaaaagaaaaagactaacttgaaagtgaagaagcttggcagtcaccaccttaagcaagtgatcaaagtgagtatcattagaaatagaataaatcaaattctgccccatagaatacaatgagtagaaaatggcatcgcttctgttattcctgccaacgatgcatatctgaatctaatggaaaggaaacggacaaatgcagatcaagacacacactacaaaacaactggcctgtcacctccaaacatgacatgggtttaagtcacagaagcaccaaggaactcttccagactgaagaagacagcagacgcatggcaactaaatgcaacgcatgattgtcagctgggttcttttgctagaagggacaatactgagactactggtgaaacttatatgggacctgaggattgcatggcagtaacacaacatcaatcccctgatttagtggttgcattgtggctatgcaggagaatgtccggttgtaagaactgtacaccaaagctttaggggtgatgggacatcaggttggcaattgaccctcaaatgggtcaagaaaaaagttctttgtactgtacctgcaaccattctctaagttgattattgttttggaatgatttattgtaaacatttatttttaaaaattatttttaaaatgacattttgaatttcaaaggatgagaaattcttgacaaaactgatgaaatcttaaaatgcttctgcaaatcaggcctcagaagtcatgctgtgtccggaatgggtgggtgtcttggtctcactgacttcaagaatgaagccgcggaccctcgcggtgagtgttacagctcttaagatggcgcgtctagagtttgttccttctgatgttcagatgtgttcggagtttcttccttctcgtggtctcgctggctcaggagtgaagctgcagaccttccccgtgagtgtcacagctcttaaggcggcgtgtctggagttgttgttcctcctggtgggctcgtggtctcgctgccttcaggagtgaagctgcagaccttcgcagtgagtgttacagcccataaaagcagtgtggacccaaagagtaagcagtagcaagatttattgcaaagagtgaaagaacaaagcttccacagtgtggaaggggacccgagtgggttgccactgctggctgaggcagcctgcttttattctcttctctggcaccacccacatcctgctgattggtagagcccagtggtctgttttgacagggcgctgattggtgcgtttacaatccctgagctagacacaaaggttctccacgtccccaccagattagctagatacagagtgttgacacaaaggttctccaaggccccaccagagtagctagacacagagtgtcgactggtgcattcacaaaccctgagccagacacatggtgctgattggtgtgtttacaatccctgagctagacataaaggttctccacgtcccaccagactcaggagctcagctggcttcacccagtggatcccgcaccggggctgcagatggagctgcctgccagtcccgcgctgtgcgcccgcactcctcagcccttgggtggtcgatgggactgggcgccgtggagcagggggtggcgctcgtccaggaggcttgggccgcacaggagcccacagagtgggtgggaggctcaggcatggcgggctgcaggtcccgagccctgccccacaggaaggcagctaaggctcggtgagaaatcgagcacagtgccgatgggctggcactgctgggagacccagtacaccctcctcagccgttggcccaggtgctaagcccctcattgcctggggccggcatggccggtcagttgttccgagtgcagggcctgccaagcccacgccgacccggaactccagctggcccgcaagtgccacgcgcagccccggttcccgctcgcgcctctccctccacacctccctgcaagctgagggagcgggctacggccttggccagcccagaaaggggctcccacagtgcagtggtgggctgaagggctcctcaagtgccgccaaagtgggagcccaggcagaggaggcgctgagagcaagcgagggctgtgaggactgccagcacgctgtcacctctcaatacttgatagaagtgacatacactgtgtataaaaatctcaaacactgattcctccttggtttgttttacaaattagcactcttccaattaacaaacttggttagctaaaaacactaaaaactgagtgtcttgttcccttttgtgaataaaattccagccagaacatttgttttttactaggaaacattagtccccactctaaattaaagtactatacgtggcctatgcccgggatcaattatccttggaaaacaaggacctcccgtacatacttgctactagtactgccaagcaaaggcctgctatgctactgcagaggctcctgtcccagcccagatccaacaggactggcaggaaggtgtagccaggggggtcaccatgagaatgacatgatgatacctacctgacaaggctcaatgagaattaaatgcaagtcagattttcaccttgatactagcatttgtggaagcattactcgtttttgttttgttttgttttgtttttgtttgttttgtgtttgtttgtttgagacagagtcttgctctgttgcccaggctggagtgcagtggcacgatctcagctcactgcaacctccgcctcctgggttcaagcaattcttctgcctaagcctcctgagtagctgggattacaagtgtgtgctaccatgcttggctaatttttgtatttttagtagagacagggtttcaccatattggccaggctggtctcgaactcctgatcttgtgatttgcctgccttacctcccaaagtgctgggattacaggcggagccacctcgcccagccgaagcattactcttattaacttaaatatcaggtttgaggtctagctcacatcatttcttcactcctttttgttctgttctcagtcattccatgacagttcatgtagtagtaacaggatttctgtctcctatgggttgactggcctgggaaatcttttatctcaagtggtcagaatgtgaaaatctagactaagcatatgtacaaatgaattcttagaacacagtaatcaaatcagaaacaaaagccaaggccaccccccacccaccagccagcaggaagcctgcaagacctcaaatcagagcacagcattggtgagagccgagtgagaaaactcaaaaactctggctgcaaacagagctggcatgcctgtggcttattattgctcactaatcaatgttgattgctcatgagtccagaaaatttgatgatatctgttcaactgaacattgacatgacaggtactatgccagatactttgctgacatgatgtcacttgaagttagttatcttatatacagggtaggtacaattattatactcattcttcagacagtaaaactgaggactagagaagtcagtagctcattcaaggtcacacagctagcaagtgctaaaaccagggtttaaacctcagcaattggtctccacagcctaccctcaacttctactctaaactgcctctcaccaaccataatttgtgactcaacggcacccagtctcttatatcacacatgcgacatgtttgtcacagcacacttgcttcacatttccacacaccttccttatttcaacagtaactgtgttgcagggtaacataaagcatggggcctcatttgtgtaacactagttcacagcaaaggcaaaaagtccaccttctggacttggagacgcatgctgctacttctgggtttctctttagttgacaaagtaataagagctgttacaataaacttctttgttatttcatttaaaatgttgcctttttttgccaggcaaaaaaaaaatttagtataatcatgcatgcatgcctctttatgtatggcaagctacttacttcttttttctagagatcatagggtccagaaaacctttcgatgggttaaatagggtcatttaaaagagaaacttaagtctacattggatggttctggaggagtttccccttccctggagctgctcaccagttaatttaggaataaaatagtctcccaacctagcaaatcccaccaccctacccaggggttttcacaaaattatcttgttttaatcatgttttagcatggaaaaatgacacatatctcaaagtatacattttgaggtttttgatatgtatatggctaatttaggaaggaatattttaccacactcctggtttaggagataactccagtcacagatgtcacactctggtgacaagtgtgtgccagctcaccactgccaccatctgcctagggcctttcctcttcattcttcaagccaaaagcacagctgatttgttgggtaatgtttcttgatagctctctagccaaaaatatatgtggttcagaagtgttgttactatagctctactcagctgggtctcgtttctggaaaccatatttagttgtcaaacagtataatgtgacagaaagattttgatgacttaaaccaataaatttcaaagttttcaatagtaaggtttcatttaagtgataagggcaatgcttaagttatgatggcgagaaaaacattgctcaattgactgtattttgttcttctataatcttaaaatgttccacaacaggcaactgcattaaaaatattgtagcatggaacagatcctctactttacaatgaacaaagcacttctgttacacaattaacatgcaaggaaaaactaaggtagccacctgcacatgtccaaacactgtgaccatatcacaacccaaccatccagtttggccaacaggaaaatctactcctgctattgcagaatgacatctgtcttctggtgtcaagcttggaacccacttatttgacccatactgctattatttaagtttttctgctccgagctccatcttgagctccaagctccatcattcctgagctccatcttgctctcagctttctcttgctccagcctccatctccttcaaactccatctggtttggagctccatttggctcatagctctatatgctctgagctgcatcttgatctgagctccaccttgctcggatctccatttgctctgagctccatctgctctcaactccattttgattggagctccatcatgctcagagttccaccctactctgagctccatctgctccaagctccatcttgttttgagctccaccttctttggagctttatcttgctctgaactccatctggcttggagttccatctgctttgagcaccatcttgctccaaaatccttttactccttgctccatcttgcttgaagcttgactttgctcagagctccatctgctccaatctccatctgtttgagttccatctgctcggagctccatcttgctaagaattcagagctcctgctctgagctgcatcttgctcggaactccatctactcatcttgcacagagctccatctgctcagagctctgacttgctgggagttccatcttgctcggagctgcatctgctcagagatccaacttggttgaagctccatctgttcagaactccatcttcctgagagttccacctgctctgagctccatcttgccagcagctccatcttgctcaaagctccatcttgccagagtgccatctgcccagagcttcatcttgctctgatccagctactctgagctccatctgctctgagctccctcttgctctgaactccatcttgttcagagttccatcttgctcagaattccatttgctctaaactgcatctgctcagagctccatctgctctgagctccctcttgctctgctctgagtaccatcttgcaggagcagacaaggagttcaagtctgtttgtagggtagtaccatgctgccaggttaccgctgggtagtttcccctgccctgcagcatgaaaaccaaaaggacgtttccaaggtccataagatggaatgggtcagaaagaaaaacaaagttctgatgagcaggacctcctcccactaaggctgacaaatacaagatgaacacacagtgagggaggcacccatgccccctgggcttgggaggccaacaagagctgcccacacacccatcacaagtcatcacccagcttaggggtgacttgtttttaatctgaaaggtcaatgttctacagcagagcacaaagcgcagatgtttccactgaactaagagacagtgtgggggcagaacttagcactatgactggcacattgcactcaaaaatgttggcagacatggtggtccttcccctctgctcgcctctgtcctcatgagccttgccacctggcatggcatgtgtctgcctggtgcaagcatagcccatctggctgggaacttcctgaggcaggagcacactttgcacatctctgtattcctaagaacccaaaagcaaatgcaacaagaacaaaaataagtaaatgggacctaattaaactaaaaagcttccacacagcaaaagagataatcatcagagtaaagacaactcacagaataggagaaaatatttgcaaactttcatccattaaagtactaatatccaaaatctacaaggaactcaaatcagcaagagaaaaaaggaatgtcatcaaaaagtgggcaaatcacatgaataggatctgagccccctcccagccctcagaggtgtcatctttgggagctccagggagatgtcttggggaaaccctggcctttgggacaggtgaagtgcaaggccttcttgggcattgctaggtgggcctggctggccagaggggtgcagaggacccaggactagcaggaaccctggctcgtcactgtccttcattctacccatcctcaccccaccctcacccaggaccctcactcagggccttttcctcctcattcacctctggccttgcagagacagattcctccttccatctgctatatcatccaagcctcacggaaccatgcagggaggcaggagagggaggaccgtgcccatttcacagcatgaacattgaagctcaggagatcaagtggcttgcccaaggtcacagtagccaggaggtggaagagctgttgcttgaagccagggctctagactccaagtccagtgctcctcagttccaccctcgagcttcccttcctttcctctccccactgctacccaggcccctctctacaaccacctccactccttctgtctttcctcttttctctttctgtcttttggttccaccaaacccctgtggaggtgaggcaaggaatgccccatgaggagaaagggaggggtgagactagagcagggagctggaaagtggaggtcaggctgctgtgctgcaatcccagcaggtggcctctacaccatggtttatatgaatggagttgtgcaatgcagggcctaggcagctggatgctgcaaccctagagacagggaatggtgctgagctttggagtcaggatgaagcaaactccagggcagtgggaaacttagaattgaacaggatgggtgggcgaggtcctggccttgtgcttgttccagtcaacttctcaggagaatccaaggcttggacaaagatggcactgggagagagcaggcaggctcagtgtggccaaggagtgggggaggatctgaactcggcaggggtcttgtatgcagcaggggcttggtccctcacaacatggagcccagggaatgcttggcagcacctgggaggtgccaatccccagtggcagtagagagggctggttccacactcacactgtcttctgttctatctgtgtcagcatccctctctctcctttcccatgcctgtgacatcctctccacccctggattcctgtccctgcttggctgccagcccccttctcctccccacccacgactgctcctcctactgtccccaccttctccccaggtgcaggatatgcctcttcacacctgacctcgcttttgaagccacagtgaaaaagcagatgcagaagctctaagagcccagtatcaagtgtgtggatattgtagtcagtgagttcacagccaccatcagaaagtgcagtgaaaaggtaggacagatgcctgggtggggctggacttgaccatccatcctcgtggccatagcttcctgtagccagaacgatctgctgaccaggcctctcagccacccacagggacccagccctagtgtgtcctgccagcttctaaccctgggtctatttgcacttttgaccctccagacccccatccctgcccaaggactttactccaacccaagtttccttggtggcatctttgcatcaataagaatgccagtgattaaaatgatgttaaggagatggcagctgtttattgagcacctactatgtgctgagtactgggctaagcacttgcccttactatctgactcagtcctctcaaccaccctaagacatgggtagtgttgtttttcccatcctacagacagcaaaacagagtctcagaaaggaaaagcagagagtgattcatatttaggaaggtcagaggaagggttctgaggtctggacctcctgggcacagggagctgtcttggttcctcaaaaccaatttgcctaaaggcatattaaattacttgctttacaataatccacatgtgatggggcagcctcttttgagttgtctgtaacttctttttgtttgttttttgagatggagtcttgctctgtcgccaggctggagtgcagcggcacgatcttggctcactgcaacctccacttcccaggttcaagcgactcccctgcctcagcctcccaagtagctgggactacaggcacgcaccaccatgcccggctaattttttgtcttttagcagaaacggggtttcaccatgttggccaggatggtctcaatctcctgaccttgtgatctacccacctcggcctcccaagtgtctgtgactttttagatgcctttttcctatttgtctgcttttgggcattttgaggatttttaaccaggttttctaaagcagttcttcccaggggagtgcaaaagaatcaactggctgtaggagcttctccagcagactgcatcagagctgctggggcagagctcagccttgcctgtatctgaaggagttcgctatgctggggggtggaggcacatcctccttagcttcaagtttcaagtaagcatcaatcatctcctttcttttttactgagcagtgtgttgtggaatccttgtatattgctacacaaagattagtctcatgccccccaccttttttttttttgagacagagtcccactctcttgcccaggctggagtgcaatggcatgatcttggctcactgcaacctctgcctcctgggttcaagttaagtaaagattggtctcatgaacttgaactttacattcaagcgattcttcttcctcagcctcccgtagctgggattacaggcacatgccaccatgcccggctaatttttgtatttttttttttttgtagagatagggtttcaccatgttggccaggctggtctcgaactcctgacctcaaatgatccacccgcctcagcatcccaaagtgctagaattacagacgtgagctaccacaccagctggtctcatgcccattaactgctgagttgtatttcacatgattcacatgttcgatgtcctattgatggacatttaggtttcaacttttttacttttttcttttttttcttgccttcacagtgctacaatgaacatctttacacatgtatttgtagtacttatcccattgtttctttcttttttagagacagggttttgctgtgtcacccagagtgaaatgcagtggcacgatcgtagctcactgcagcctcaaactgggctcaagcaatcctcccgcctcagcctcccaaggagctgggactacaagcgtgcaccaccacacccagctaatttttttgttgagacaagatcttaatatattgcccagcctgctctgaaactccaggcctcaagcaatcctgctcagactccatcagtcccttcttgatagatatttgggttgtttccaaattttactgtaattacttctttccttttggaaggagaatcaaagtgttccatggtttttaaatgtttatatctaacaatcaatcttctaggaatctatcctaaggaaaaaatcctagagaaagagaaacaaaattctttatccacaaagatattcattgttaggttatttagaatattgagaaatcagagattattaaaatgtccactaataggacaatggttaagtaaacttaaataaatctatccaataagatattatgcacccattaaaaatgtttatttaggctgggcactgtgggtcacgcctataatcccaacactttgaaaggctgaagcgggaggttgcttgaggccagaagtttgagattaccctgggctacacagaaaaaccctgtctctacaaaagcttaaaaaaaattagccaggcatggctgtgtgcacctgcagtcctagctactcaggaggctgaggcaggaggattgcttgaaccgaggagttcagttaaaccactgcactccagcctctgcaacagagtgagagaccctgtctctaaaatcaattttaaaaaagttagagaccagcctgggcaacataggaagaccccatctctacaaaaaataaaaaagttaggtgggcatggtggctcatgcctgtagttccagctacttgggtggctgagatgggtggattggttgagcctgagaagtcaaggctgcagtgagccatgattgcgccattgcaccccagcctggaagacagagcaagaccctgtttttaaaaacaaaacaaaaaagggattcacatgtcccgccacagtgtactgtgggaaaaaaagggagtttctgaaaagaatgtatggtattttggagaaaaaatagtatttatgaatgataaaatcccaaaggcatattcaccacagaaatattttcatgtccaagtcacaaattttagccatgctctaatcttttacagtgagtctgtgtgatttttgtgggcagaaaaaactgatcaacaaaatctttgaaaagaaaagctttagtctaaaaggaggaaaataatacttttgccttttgatttgtttaaggatcataattattttttctttataggcaaaactcacccatctttgtatactcatatttttcctctccaagtttctaagtttagcaagccacttctgccagaggtttgataagtgttaataagtgaatcctaattaatcctagccctgctgggattagacttgccatctctgaataaaatctagagtttaaggccaaggtgggtgggtcacttgaggtcaggagttcgagaccatcctggccaacaggatgaaaccctgtctctactaaaaatacaaaaatgcaccctcaacagaatcctaacaacaactgagatctggccaggcactccccactttccccagcctctgccttccaagcacaagctcattgaatccaaacagccttcggtggtaggtactgctatcaaccctcttcctgaggcccacatgaccaaaccactcagccaaggccacacagcaaggcagtgctgaagtgaggattcaaacccaagcagaccagcttcagagctgtgccatgcaacccagaggcatccgggagtccaaaacacgggccctggtgagagagggctgcacaatgtgtaccctgaactgtgcctcctcacacggcccagacaacccgcaggaggctgggactaggccagaggcaggggggtccctaaaagtacaaagtcccagtggcacaaggtccccaggcaggactggatgtcaagtgatacccacctattaagggctgggttttgggctatctcattatcatttattccccataaaacaaaaaccctgaggtagggattcttttatccccatgtgacagatgaggacacagactcagaaaggccaagtgactccccgaaagccacacactggttagcagtggagccttgattcaaacccagaagggcaaacccaaagccccttcctctcacacctcatccctcctcacctcaaggccagtttactgagcagagaggaactcacgcttccagattcaccccatacatttaacctgctgcgcagcaaatgcctggactttgcctggcagaaaatgatcatgaaatccctgggatgggggcagcctgggccctcaagaaacatcccaacccacattcccattgcccttgttgaggaggtcagtcctgggaaatcctactcccttgttccttcccaggttccatctgagctaagtgcctccaggaagggcagggagccccatctccacacacagcacgggaagagggggtgtgacacaggcctacatcagaactctcaccagcctcagcccctgcagacccggtgggactgggctttgcttcttgttagactaagggaaagggggcttcaatgacagtctagctcactagaggcagaacaaactgccaccagttccctgcccacttcttgcctggagaaaacacccgctcctaggtggtgagtgtgagcagcaaattcaggcccacgtgggccaggtaaattgggctggctgccatgcccctctcacctctcccaggcttcccgcacaagcacgcaggcaggttgcttcagccccaaatacagcagcagaggtggtggtggcaaagggtggggcaggaggtggagggtcaggcttacagacgggacggaccctcaggcacagtgacagcagcccagccactagggcctgtccacaagccagggctggccaggatcaagcgagtcactcagggtcctcccagctccttccttccctccaacactgaaggctctcagaagaaccagctccaaaaagggagcttgaagcctctttccaacctcccagtgcccacctcagaagcagggctgagggcagagatgttttataagccaggacccctccccatgcaagggtcgtatggaccggtgtgtgtaggggcagacctgtgactgacatccacctacacctgaccctcatctctgaactcaccccacttccttgcatacattgaagaggaaatggcccacactccatgaatgccggggtctgaggtgggtgacggcacccatgagcccctgccagagtctgtccacttcccaacagacccctttcccaccttcccatccccaaccatgccaaggccttcagggatggagaatgaaatccttcctcctgcctcacaggaaccactcacccacacctgcagcctctttccatacaggactctgggacacagggccatcagctccagcagcatctaacacgagcaggtccacagcaaccttgctggtagcctctcttctgctacttcctgggtccacactcagcctaggtgggaccagcctcccccctgccaaggtgaggacaggaagaggcatggctagggagctgtcagtcatacctcatggtggtaggcagcatttaaagccaggtggcacctctcacctggttactcgtcaccccactcacacagcctgacacagcctcactgcctccccatactcacagagaagcagattcagctcctgctgctctaggctgggaaaggagcagcgggtcagcctctaccctctttctctgagaaccagaccatgccccaggctgcacactgctggcagaatcagcctagggggtaaaaagcttgggttctcagcccactccaggaccaggatggggcctttcatctaggcttctgacacccacacactcggaggtcctggtccccatggtaccccagtgcccagcacagagcctggcacagatcaggtgctcaaatatgtgttaaatgaaaacaaaataggatgagatcagtcccttactcctactatatgaaactgcttctccctccatcgtatggcgtgtggaccaggaggcctcgggtccttccggaccagacagtctgtgatagccatgagcacctgaagcctggggtccatggttccctgaacctgttacaatctctgccaggcagagaatgcactgaccagctcccagagtggatagggacccaggtgtccctgagccatcccaggtgccagagcgtgacctagctctgaatggagacacaggtttcttctggactgacccaggactggcaggagcaggatcagaagggccaccttaacctgctcactcctcctctgtaccagccaaatgtccacagccaggccaagtgtctagatttgctcagcctgacctctcgacacatgttagcacaagtggtttcccacccgtctttgttgttgtttagcatctgttgagggctaagtgctggggtgaatgcctcgcctatatcactcaaccttctcagcctatctatgaagccgggtttttgtttgtttgtttgttttgttttgttttttgtttttttgagatggagtttcattcttgtcacccaggctggagtgcagtggtgcaatctcggctcactgcaacctctgcctcccaggttcaagcgattctcccgcctcagcctcccaagtagctgagattacaggctatgccaccacactcagctaatttttgtatttttagtagagatgaggtttcaccatgttggccaggctggtctcaaactcctgacctcaggtgatctgcccgccttggcctcccaaagtgatgggattacaagtgtgagccaccatgcctggccgaagcaggtattttatcatgactctgcagacaaggaaataaaggctcagaaagattatgtcatatgcctaagatcacacagcaggacagtgatgggacagaatcagaactcgggactgtcagcctcagggcacactcccctagaccagcacccaagtcagactatgcccagccaaccctggacatccagggctcaccccatggggtccaccacatctctgggaaagctgcatgatgggctgcctggaggcagtggccaggccagaataacccatgccagcattcttccatctcactcttcccgagaccagcctccagccctgaccctggggtaccctgctgccttagccctttcccatcctggaattagcaccaccaacccaaggggcaatatgttgattccagaacaggcagatgtgctgatgaagagagaggcagctgctaggactctcctacctgtcactgggccaggtgtggaaggaggggcaggagccaggggaaagcagagaagcaggggattacacgacagagcctttgcaggggcgagggttacatatccggactaggagctccccagagcccactgtctgtcccatccacccaggtgctcatgctcccaacttgttagtgccaactcctggccatgggacagcaaaacctcagacaacatctactcatccctcaaccaacccacgtcaaatcttgcctgggcccagcccaatctcttctacggcctcctgcctcatctccttccctcaccccctgccgttcagctaacttcctaaaacaaaggtggcaattgtgccattcccttccttccaacctactgtgcctatccatcacctggctgggcgaacccttccacctttctctacccacatgtccactacccacacctctccagtcaccccatctctccaggctcttgctcttgcagttttcttggccaagtaagtggcccttcccaacagagcaaaattctacttacatgagaaggcccagctaccccttccccgaggctccccagcagactcatggcagcatccctgaacccacagctcaaagttctgtggacatcaagcaccgtgtcttgttggagaaccacttgtgtggggttgacttcccagcctcacagagcttcctgagggcagggctaggtctgattcatctctggagtataggtgtagagcagaacctggcacagagagggaaccagcacaccctgttttaactgactgcccagtgagcctggtcagcagacattgggtaggccgtagggcttgtccacttgagctttccaggcaaaaaaaactgtcagagctggggattcgtgcttagtttggcaaggctcagtattagaggctgaagaacccttggcagaactgccagcccatccagttgcggcagtgccaccccacagcatagcaagaggctacattggcaagccctgactcaccataggttgtaagaacagccagacgcccatggggtgctagtgatgctgggttcatctatgactgcagtactctggacattctgagctgctcatctggttccactagatccccaggccctctcccaactaggcggtttgaggtctaaggaaatgccatatcccctgggtatggagcttggaatcttacctcttcagccattctgctgacccctaaccctgcccttttagccctcaagggcctacaactaccgcaggagagctgaggggtggaaagcacagaaacagcatgacataagcccaaagagtggccagaatctgaatggcttgggctgatagcactggccccaaatggagatggaaagagggatgacaacaagaggaagcagcggaccaaagtctggcagaagctagggactcatagtggtatcatccactgtatttgaaaatccttgagtagccgtgggcaaggagaactagactcagacaagtagaaagcccgcaaatggattcccggggcagaagtccaggctaaatctggaaggcgcttcaagctcacaggggaggggtctgcagggccagctggaggattttcctaccctttcctcagcaaccaaaactaccctccccaaagaagccctggcccactaggtccatccatggggcagaaccccatggaggctccttaccatgcagggttgtcctagtggacagcgatggagcagagtttgggggagatgctgcagctctggtgagaagccacccagtctcaccatagggctccacatggaacttgtagggatggggggtgagccggcactcactgccaccccagccaactgccctgagtacccggcaaagcccagcagcatcagcagcagtaacagagtcaggtccagtagtaacagtaacaggtccgacatggctctggacccctgcaccgcaccccaaggcagctgcaacagagaaagaagggagaggaggctggtagccatctccaacaatgtgcccacctgaccaccaaccagttctgcccccagctcctcagccctgccttgggtgctttgacccaggaggtggaggggccagaggtgtcagcacatagtgacctagaagagagctataaaggatgactgaagccacaagcctctttatttcttaatcacagtaggtgaggatctcagaacagctttacctgtcagctggcagccctggtcacacctggggaaactgagtcacagaggggcacagaagtgagtcatccagggacatactcctggcctggacaactctaccccaagatatggcagatgccagccagcctgcctttcttccacaataccatactccttgcctggacaagtctcccccaagatgtgccagatgccagccagcctgcctttcctccacaataccacttctttcccacagcagagccacactgccagtccagcctcctgaagcctcaggggctactgccagagggagggcagacgaataccagggtccacacacctatcaacaaacagggaaaccataaggaacaaaattccctggggggaaatgtgagacgggaagagaatttcataggaaactctcctttgctaagtacatctggcctgcagggaccttgctctccagcaagctcacccatccagaaccagagggaagaccacagcaaaatggcctgagcagctagaacaaagtccaccattaagcttcccagacttgaaccacccatgttaacaagcctcatcctaattttctaccccgaagaaacagtgaggagtgagaggaaaaggttgccagaaggggagtctcagaacaggaagcagtaacagttacgcatagaggaagggaagctgttcaagagcgggcccaggaacacaacacagaaccactgtgtgagctattccaggcaggctgcctaggtttccaggcagctcgggaccagaggcctaaccctcttacacagaggccttgacctgagttgcctggagaggggggaattgtagcccagagaatactgtttaaagaggaagggaagcatgtgacccactgggggaacattcccaccccaattatttaaaactaatacttaacatttaaaaggttttgaagctgaaaaggccacactgcagctttgtggaaaacttagctctgtggaaatatttgttccctgtaggttctgggtgttgattttacatttaaaaaaattatttttggagtcaatgaacacacagtatttgctcacaaagaggcaaagtaaatttctttctttttttttctttttttttttgagatggagttttgctctagttgcccaggctggagtgcagtggtgcgatcttggctcactgcaacctccacctccctggttcaagcaattctcatacctcagcctcctgagcagctgggactacaggcacttgccaccacacccggctaatttttgtatttttcgtagagatgggtttcaccatgttggccaagctagtctcgaactcctgacctcaggtgatctgcccgcctcagcctcccaaagtgctgggattacaggcgtgagtcaccgggcccggcaaaggtaaagtaaatttctaaacttttggtgtcaggacacagaggtgctgcccactggtctcagccatctgtgctcctacccatcagtatctctctctcttttctgcctgtcctactcatcttgtctccagttagtttcattcctgttgtctttgatgataatgataagaaatcttccaccgagcacttactatacgccaggcactaagtgtcgaaacacagctgcttcattcatcctcaaagcaatccgacaagacaggtatggctaagggcgcaagaggttagaggttaagagacttgcacaaggtcacacaggtattaaacagagccacgtggaccaaaatgcaggcaacatgaacccaaacactcagactccaggcccccatttccacttcctctctcctctctggtgactggcttccagaaagactcaagaatttaatctttgttggacatctctgagcccaaagctgcaaaactcttagcatctaggccccccacttgccatgggaatgacaagccctcactctgatctgccatctcagctgagcacttcctgtcccctgaagggaacttagtatccacctttctcttcttctcacctcccaaactgttcagaaaggggaaaaatgcacctgcaggccccagggctttggtcagcacggggaggggtaatgtaaatttcccctgtattcaagagaaaaggggccgggcatggtggctcaggactgtaatcccagcactttgggaggccaaggcgggcagatcaccagaggttgggagttcaaaaccagcttggccaacatggtgaaacccggtctttactaaaaatacaaaaattagccgggtgtgctggcgcgcgcctgtaatcccagctactcgggaggctgaggcaggagaatcgcttgaacccccagaaggcggaggctgcagtgagccgagatctcgccgctgcactccagcctgggggacaaagtgagactccatctcaaaaaaataaaaagaaaaagaaaagagaaaaggaagacgggctgggagcttgcctgaaactccaggcttacgttagttaactcatggcctccagtgtggccggtacgagtgcttcaatgccgggagctgaaaaggaacagtcactccggaacaggaaataacctctgagccgagcaccacgccctgactcccttcttcagggaaagccccccggggcctctgaagcaccctcgccccactctcaacccccttgggggaaatcagaagccaaacctagattcacagtgtcagggatcttccctagagtctgggtcacgcccctcttcctggagggcttcaggcacacctggcgcccaggaactgccgccgaccgggctgcgccctctctcaagcctgggtgtcccctccgctcagaggtcggcgcgggcgagcgtcagggaaggctgtccccgcgggcttcctgctgccgaccccgtgcgcggggcccggaggccgggtcctttagggtccccgccgcaggctaaacttcagtgctggaggtgcaggggccaccgcctcgcgcggtcggattccagcccctgctcaccctgtcctcgcctgttaacttacagcttttcttgtctcccacctccttgccgagtcccgcacatctgtaacttcagcgacgctgaagtttgcagcccgcgtgagaggcgcggccctgggggacagggcagagttaaaacgcgactcgggcctccctccccagctccactgccccgggcgtgccctgagcctgcggccttggcagtgggcccggaagggtgggtgctgccccaaggtcgcatccaggccctcggaccctgccggggccagtagtgggcaagacgagactccaagagcggccgggccgctggggtcactggggatagtcctgaggtcttgccgggtaggatgggggtcccagacccacgctccagcggggacgccccgactccagcccggccccggctccggaccggccgggtctccgacaccgtccgccacgcacgccgatccgccccctctctggcagaactgggccctgggcgtggccgtggccgtgggcgtggctctacccatggcctgagcgcgcgggacccggagggctgatgcctccccgccccgtctccacagcaacgggcgtgtgcggggacccagagctggctggggtggaaaccgcggcctactttcccgcctccagcaaactctgcaattgctgaggttgatttagcagcacccaagggatctgggtcggcaagagcacctcagtgacagcctggcaccggggtccgcaggagaaggccaggctggggccagggagctgaggctgaggaggagcgtttgcacaggctagggagacacggcacagcagtatccgcctcagacatttgtagcaccgttagtcctgccactttctctcactgtagcttcgcaacagacttgggaaccaagcaaggcatggctgaggaagcttaagcccagtctgggctcgcggaagaagctggtggatccaaatatctgcttcctgcctccacccacccctccccgctccgtgagcacattcatccatccaacatttatgatcactccctgccagggcaattctaggggctggggatacagtgaacaagaccaaggctccgccctcctggagtccacatcccagggacatgcccttcttccaggctcctccctcagtgccctggtggtggctgggggaggctggtctgcctttctggttagcgatagcttaggtgactcccaggtcaagtgtaagctccttgatgatggcaggaaactggtggtggaaacagtcagtaatcatggggtggttcaccttgtggatcccactactgcattagcaaagagcaggctgggcacacaggggcagtcatcatcccgcttcctttctctctgcttcacgttcttccttccgcaggcaggggagatggaacctggtccacagggccaagcctgtcccagccctccaggcagaccggcggaataggtagctggcccctcacaggcactgcgatccgggtcagtgcagatcgcggcagttattttacctatgaacgcccagcacaccgtcaaacgctcagctcaggtgccccaggcgggcaggcttttcacttgggagcatttcctttgacacaaaggggaccatggcactggctcagagactaacagcctctgcctgcagggtctgctggtcagttctcctgcttctcaggaggtggtcaacttttcccaggaagccattgtaaggaggcgcccattcttcatcttgtcctctctgctcacttcctttagcgtggttggggaactccagagccccacatcacagttcagcacgtgcctcaggagcttcagcacctccttcgtgaaaggagagtctgccggtaacgggggaagcaggccatcagcctgcccagcttcatctcaggccgcttccaacagcgccaagcaaactcccttggcaagatccatgcaaggccgcggctgaccaccgggaggcagcagcctactctgcaaggcactctctttacccgacccccacccccttttaacaggtggcaggaaacctgctggcccagccatctgccgcacccacccttcactcccagtcccatctccccatagcacagatttccctatcatgagcccagacgtggcctgcatctcctcttgccttcctctgcccaaggaatccctacagagattctttctctatcttcctttatacatttccacagaattgtttccccagggcccctccccttgaagaaattagacaggaagctggagtagatggttccctctttcccacctctcacactcccaagctctggttaactctctgtgggccagtggctagattccccaacacagatgacaactgaacaatacacatgcagcgtaagaatgttgtcgctgccaccagccacttacagatacaccattgctaaggtccacccaactggactgtttcccccttccatagactaagccccaaaggccaaaaataaaaccccctaccccaaacctgcctataactgtttgaccagaggccagctgtcccaggatgcggttaagatgtctaccttgcacaacagaactggcaagaaaaacatctccaggaagcggtcagatacacggcacaaaggactcccccctccccgcttttccttttccttcaccctgacccagttctacgccctgtaagacgttgctccagcctataagtggggctgcctcctctgcttttgtcaagagatagcccggcaggactgacaataaatcagtttgcctgaacttgggtctattggcctcattcctttcttggctgtccttccaattatcccttacaaccatctcccaccctctgaaggcactgcacccaatccccagccgttcgcagtctggtcagggctgtctgtgcaggacttgtcatggctgaggcccacatagcctcaagccactctgaagtcagcttgctgtttcccctggagcctggaaatacatccctcttcaggtaaacaaaagcagaaaaagcccagtgaaccccactgtaacaaagaaactgccagcaatcttccttctgttcctgcctgtctcaccacccaaggactatcgcagagcccactgtgttctaagatctattcttttcactaccacccagccaacccggtgtccagaccattccttgatcaaataacactgtcttctggagttttaattttatcttacaaaaagtgaaataaggaaaactgataggcaattatactgacttacaatttttctgtttgctttttttttttaagcaacatgaaacgccagtaaaaataaatatgtcacagaaacagccacttgtccagtctctggggcaagaactccagccctgctgagagaagggaagcccaccatcaccccagcagctggatcgccaagccacagatgctcctcaaagccaggcacaggtcccaggcctcaggggcatcctgaggaaagaagatggaaaaccaaagccagttgcccagaccctggggccacctcatcaacccccactcctcctggcagccgtctggccttagtggttaatcatttgcggcatctccgcctttgcccacctggaccctctttccctgacctctctgaagagggcacaaggaaaaaacctgtcttgggcaggctggggggattcttccagtgagtccccagcccaccctgagtaacacaaccagctaacagtcattttacacccaggtgcacatgagcacagcacacacataactctctctctctctcacacacacacacacacacacacacacacacacacacacacagctggactgagctgtcttccaggaagggtcttgggtctggtcacagtatgaggtcctctctcttctgaatatcatctcaatagtggtggcagagagaacccaaacctccccaagcccctgcattgcagactctgtagccggcctggctacccctccccagcacacaggattactatgtccaatagacctgcaaaagggaaaggagcacactcaggacccggaagagcaaagaaggtggacactgtctgctcaggacactcttcgttgtaagactcgggtataaataaaaggcccagggccaagctagtggcacagaacagacattaaggggttcaccatggaatacacagggcagaagagaagacttggcagcagggaaatggagtctgaaggtgaccaatggagagcacagcattctcagtgcttgagatgcagattccagggagcagtcagcagagggccagaacatcttgtggggatccttttggggagagatgacttctcttaggagttttggtggggaagagccactgagctcggtgcacagaaggccacggtttacagggagacactggtcttctgagaaatcaaaaaagaaagtgggaagcaggaagttatatccagaacactagtataaaggaatgaaaagcccccagagaccttcccccatgggatgaggactcaattgcaaagcaataccaggcttgaattgactgacacagagggcctttctctgctgacagctttgggagtgatggtcccacccaggccgcttaagtctggctaagtgtttcaaccagtctgcacaactttaacccagctctttgctgtttgctgctggattgggaaatttcatatttagcagtgaatcacaagtatacagagtctccacacactaattcctagagaagagaactctgaataaaggaggagaacacccctcatattgtcttatgcccaatttctgcctccaaagaaagaagaagtaaaaactaaaaggcagaaatgaaatccacaagcagacagcccagcgccacaccctgggcctggtagttaaagatcgacccctgacctaatcggttactagtggtgcatgcagcccccagtcatgtaccccctccttgctcaatcaatcacgaccatctcacacgcacccccttagagttgtgagcccttaaaagggacaggaattctcattcagggagctcagctcttgagacaggagccttgccgatgctcccagccaaataaaccgcatccctctttaactcggtgtctgaagggttttgtctgtggcttgtcctgttacacaagcaccagatagaattatccctaaatcaagagatgatgagatagacgcttaagaagcataactcagggccaagtgcagtggctcacacctgtaatcccagactttgggaggccaagttgggcagatcatgaggtcgagagatcaagaccattctggccaacatggtgaaaccccgtccgtactaaaaatacaaaaattagccaggtgtggtggcaggcgcctgtaatcccagctactcaggaggctgagacaggagaattgcttgaatttgtggaggttgcagtgagctgagatcacaccactacactccagtctgggcgagagagtgagactttgtctctaagaaaaaaagccccaaattccatatgcctgcccttaaagttattcccaaattacctctaacctttaagatatgtctcactttctccaagataataaaagatgtgggtgaaggaaaagaaaaacccaatcaatcaaataggtgaagaagcagacataaacaggcagaagggaaatggcagcaacataaaataagccagaggcaaagtatcccccaaaccagaggagccttggggcatgcacagctggagagagcaagtcagagagggatcttggcactgcctcaccttccacttgtccagtgtggggagcactaccccattggaacggttaaggtcagacaccaggacattcagaatgtcctgaatctacaggaggtgaaaagggtagaacaagggcagggggagaaagacagaagtggcttagagagaggcaagagagtcagaggaggaggaagaggtagctttagggaaacgaaatgctgaagaagagcaaaggagatcaagaccatggtctggccttcaaaatggctgcctgctgccttgccaggggcagaaacaaatagatggagaagtcccctgagcgatgcagtcacacagggtggagtcacctgaccgatgccactctgaatactctcattggatccctctcctcaggcccaggatgtggggatgaatctggcagagcaccagacctccacttccattttaaaaaccagacttttgagtaagggttcacttgaacaaaggggactcccgcaaaaaaaacaagtttgaacacactgatcttatccaatgtcatcttacagaggaggtaactgaggcccaggggaagaagtgacttttctgtggtcacccagcacgctggcggcaaagatgagattaaaagttagatcttctcctaatcttagtgcctggggctctcctcaccacatcctggggccctttcggtgactccaaaaaagacagcctgatggcaagtggctgttctcattggcctggcttccccttgagactggggatgaggaaaatgaaacagcaactgtcatttcctgggtgccttgggtgtttatggcaggccctgtacttggcattaacctaaaaacaacaataacaaatctcatttaagcttcacaagtgtaagtcaaacaataccacccctattttacagatgtgaaaagagaggcccaaagagatcaagtaatttgccctacatcatatccttagcagctggagaggtaggattaaaacacagaattcttaaccaggacccaacagttcttccacaatctaaacaactaccctctactgcccttgggccccctgtccccaggagcctggccagccaagactcacatccccaggtgagtggcaaccaccagaagtggttgtctcagggttactgccattttaaattttctctttcgctcctctaggaacaccaaggctgttcctccactgatagtttcttatctgtggaaaagaagagcaggaattctcatgagaagtccctgcagtcgcatctgactttacagtttttactgaggcaaaaatttaaaaataataataagtactacgtttatttacttcaagaaaagtaaaagctaaggcccagaatgtggcaaggcaagggttaaaaaaaaaaaagaacaagttttcctctacctagcaagctcacttcaaggacagttataatactgtccaaatagccaaggccagaggaatgggctccagacaccccatcccttccagagcaaggttaaaaaaaatatatatatattttactgttactcttttcccaggcttcttaagcattattatgttttacaaatgtctatatttatccaggtcttgtttttctttcaatgcagctacaaggtcaccaactatacaaggtcacaacttatgctatagattacatgacctatgactgtataattaactgcttttgttttgcttctgtaaggctgcttacaaaaaccccactctgactttgttcaatgttcagctttttaaatataaatccactgagccggtgcgtacctaaaataaacaacaatcctcctgtactccatattggtctctccgttcctcagtttaccacatttttggcagccatgaagggaccggagactgcaggctgactgtctcctttgcctctggggtctggagccctgggccaggggaaacctgtgaccccaggtgccaccagaaaatcttcagcccggaggggaaatcagctttcccctgacctggttccccctacgcagcagcacgacaaaacctgaaaagaactacaggacaatttcagaaacagagcacttcaggaaccacagtaaggttttgggggcccaaggcaggacccgcccatagggacagaaagaaagctaatcgcctcccggggtgtgccaaatagtccgacccagaggggctgggggcaacaggagtggctcaattcagataaaactcacaccccagctgacacaggacacgaaagtagctcactaagtcagctagaaaactgacgagagtggcttaccaccccaactacaaaactagaggtggcaaaagtggctcgccaccccaactgcaaaactagaggtagcaaaagtggcttgccaccccaggtacaaacatgagaactaaaagtatataaaagtgtgtaaatggagggacctaattaggctcatcagtcgcaaaataagaaatcacaaatctcttaacgtaaactgtatgctccaagaaaattgtggggcaaactgagactaataacaatctacatatgactaataggagctgccctacaactccaagttataacaaaaataaaaaactctccaaagccaagcagcgtctgaaaactcctgtaataggagacagcatatagtcggccaaaatgagaagaaaaataactgtacaaaagtaaatgtgcagcatcataactgggagaaaatgggaaaaaactcatcaaaacctagtcccttaaaatatatatttaaaaacttaaaagttttacagaaaattataaagttaagttaaccccccaaaagttaaaaactctctgtaaattaaaataaccctcttttagtattaaatagccaaccaaaggaactgtaaactaaaaaacaattagccatatatttaaggtggtgacaggggtcagaggacagccagggcacccagaccaaattcttttaaattgactcatggttaaatataatataaacaaaaccgacataaatccagccctgtttaatggcttattacaaaaagccaaaaataaaaataaaaacagcttcgccggcagacacagagttaaaggaaaagtcccagaaaaagcaaaagaagctagtttataggagccaccagagggaacaaaaattctccttccatatgtcccagcctacccccctttaccgaggccaacagctccagctctccagaaaccagattcaggagccagcatgctccaagtctcaccccaaagggaaagactggagcctcaagaggctaaggaaggaagtcaaaatagtcaagcaggccgtcccaaatctggttgtgctcgagctatacaaatgcctctcagggagatacgaagacccatctattataatgaccagggccacatcccagtggcgggggggcaacggactttcttctatcagcccttttcaaccactcatctactaaactgaaaacaccacacaccctcctacacggagaagccccaagctcttataaatctgatgcattccatctttctgacacataatctaacctggccaaattgcaggcagcttttcctaacgttgtttaacattaaagagtgccagagaatgacataagcagctctccgctagctagaagcccatgcactagcagaagcagtgaatgctcaagcacatgctcaaggctggttcccagaagcagaccccaatcaggacccagcttcagcgcctgcagaggtacaaagaggtcgcttttacaggggtaaagagctggtaaaaagagaacaattaatataaggaaaatttcaaaagtgcttcagagagctaacgagagcccaagttagttttataaaagactctgtaaaacattctggctttacaccccatttgaccctaaggctgccaaaaatcagcacgtggtgaacacagcatttgtcaggcaagcccagggtaacatcaagcagaagctgcagacatgaatgccacccaacttataaaagtggccaccaaggtatatgttaactgtaaccaaggaacaaaatgggaaagagcaaaagtaacaagctaggcacgccaagggttaagtccctctccccagcccagctctatctagaaaaagagggggcgggaaccagcgccaggagaagagcaaagaaaagaaaaaaataaaagtgtaaaaaaggaaaggaaaaagaaaaaaaaaattggaaaaaaatagaaaaaatagaaggcagtgcataggggcagcgcccgtgccgttgtccggccccaccagccagccgcaggagcaggagaactcaaaaagaaaaagaaaaatgtaaattaaaggcttaagaaaaaggccaatctgttggcaacagctcttataaaaagagaaattaacaatgtgagaggacgtggacgcgggcatagacatgaaagaggtcaagttaagcaaggattcgagagccagacaaggttaaaaaaaagatcaatgcgtgagatgcaaaaaaaaggacactaaaaaaaataaatgtccagaaggtaataaagagagtagtaaaggctgtggtataaaaaagtcaccagctaaaagctgtcacaccctaaaaaaaaaaaaaaaaaatactgatctaatccgggctggcaggggctaaaaaatataaagactagagacagactgagcaccttctcattaggcttccagaagcccacagtcacattacaagttaaaggcagcaggattctgccatatctggattccaatttctcactaatggctaagtcactatatgaagttacaaagtggggggaacccctcctctgggaaactaaacaggagaaagagccatgctttatgaaaacttgcttataaacttcataaaattgccccatgccagaggctatcggtacatgctagtgcttatttacaccttttcagggtgggttgaggctttccccaccaggacaaaaaaagcacaagaagtgactgaagtactgctaaaagactttatccccaagtttgaactccctctaactttaaagtcagacaatggccagcatttatagctaaaatagtgcaaaatttaacaaaactgttaaaaataaaatagaagttacacacagcctatcggccacaaagttcaggaaaagtggaacgcatgaaccagacactcaagcagctactaaaaaattattgccaggaaattaatctataataaaatcaggttttacctatgaacctcctctgagtcaggtacacccccaccgaacaaactgggtatttgccctataaaattttgttcggtcggccacccccaaatcacaaatcaaattaaaggtaatctccaagaactaggggaattaaccttcaaaaaaaaaatgcaggctttaaaaatagccatgcaagaagtccatgactgggtatgggaaaaaatgcctataagtctaacagacccagcacacccctttaaacctagtaactctgtttcagttaaaaagtaaaacccaacttctctaagacccatgtgggatgggccccatacagtaatcttgtccactgccactgctgttaaagttacaggaatcatgccttgaatccatcacaggcagctaaaaccggcagctcaggacaagtaaaccaaccagcaggacccagaacattcaacccggctaatcttgagacgagaccaagctgctgctgaggacaacaaccctgccctggtcactccggaggctgaccagtctacacacggctgaagcttgaggaaacaagccctgttctaatcacacattggaagctgactagtctacgcacggccaaagcttgaggactcgtcaagcaagtaaatgtaattaaaaatcttaaaactaatagtttttctgtaatactattttcctatttgttctgtcactgtgctcaacctcctcccccaagtaaagacctcctttgtccttactaaatataagtatgctgtacattgttttgctgttgttaccccccccttaaccatactaaaaaaaacacctatagaagggtgtccccactgtacacatactacttggtcagggaacagtacaactaaaaccctgttacactatatgtattataaatgtacagagactcgcttagaaacttgtacttacaatcagaccacctattcaattaataaccctggaaatggccagccttatatatgctataaccctaagtctttacctgggacttggtttaaaattcataccaagtcaaaggaaggaagtcttataagtggcgggggggctatatccatatactttaatatttgtcagttcacatccatgaacccaacctatttcacagtctctggtcctacagggtactatacaaactgccagtacaaaattatatatacaccccctgtttgtccctccaaggccctagcaatagtttgctggaactgcacaacgcagttcactgacggatcatcaccgaggccaaagcgaatcttgctcatcaaaataccagcaaaaccaaattgtaagacaaacacttacagtcctataaatcttactatcttaaagccagatatacctatatggactacaggttactccatgacattacgaagctacagtcaaaaagctaaaatagctttatacattataaagaggactcaaaccaagcagtcagcccagcagcaattccgagtctttacgtcattctttgaacatataaaccagaagttaccagagcctcctcctttaaccaaaaacctatttgctcagctggctgaaaacattgccagcagcctaggcatttcctcatgttatgtttgtaaagggactaacatgggaaaccaatggccttgggaagcaagagttaatgcctcaagataactttaactgactctttccccagactgatgcccacaagttcaagcgtctggctcttaaaaacttctattattaaaagatactgtattgctcattggggaaaagtttttacagacccagtaggagaactaacctgcttaaaacagcaatattataataaaacattaaacaaaactttgtagcagggcagagataactacaaaacaccccatccagacccattctcccgcttctcttctctaaaccacacttaatatccaaatacttagcaagtatttggaagtatttgcaagtatttggaagctccaaatacttggcaagcatcccctggtctttattagatctgtgggccatgggcatatcaacagttgctagctaaatgaacaggggcctgtgtgcttggaacaattagactgtctttcttcctactcccactgcaacagagagaaactttagggtatcttatctataataaagttgaaaaaatacagatataagaagaaatataaaaattaaaaattaaaaaggcacaaattggcaccctaaaaaaaaaattcaatactataggccagctacctggacacaaaataagtcataggcataccgcagtcctatttacatgcttaaccacatcataaggttgcaggcagtacttaaaatcatcactaataagacagcaaatgcattaagtttactaacccagcaaaccacaaaaataaaaaacgccatcagaacagattaactttagtctgccccctagcccacgaaggaggagtatgtaaaaaattcaatctaactaattgttgcctgaaaatcaaaaataataaaaaagcaattataaaaataactacaaaaataaaaaaattagcccacgttccagttcaaacttggaaagagtagtctccagattctctctttggaggctagttttcattttttggagggttcaaaactttaataggagtggttttagccacactaaaaagtttcctaatactcccttgtctgttacctctcattgttagaagtattcaatcaactatagaggcaatagtagctagaaaaatcaacactcagctaatagctctgcgtaaatatcaacctttgtgttaaaaaaaaacaaaacttgtctcttcaggcaaaactaagtaatagtaatgctttctattaaacttctttcataaaaatcatcaaacgggggaaactgaggcaaaaatttaaaaataataataagtactacatgtattcactccaagaaaagtaaaagctaaggcccagaatgtggcaaggcaggggtttaaaaaaaacaaagaaaagaacaagttttcctccacctagcaagctcatttcaaggacagttataaaataacgctgtccaaatagccaaggccaaaggaatgggctccaaacaccccatcccttccagagcaaggttaaaaaaacaaaaacaaacaaacaaacaaaaaaacacacacacaaaaaaccagattctttactgttactcttttcccatgcgtcctcacggcagaaggcagcctttctgttacatctaggaattgaacagaaagaggacagcccaagcctcatttcagagaggtctggtatactcttagaaatctatgagacggtcatccctaaatccattaatgttttttctctctgaagagaatcaagggaaactgatgcttcagaaagatgccccatattaccctgtgacactcaaagtcccccagattgagacatgaggaagattcaagctgtcaagttcagtttcccaagatctctttcatggtaaataagcaaatctcactccaggcagggtctgggctgttaaggggaggggctgactgacaagactttgatggggggagcccagtggcacttgggggcccagcccagtaagcctcgggagtggcatgagctctggccgcagtcctgccatcagagggattctggggctgggtgggggaggccatcacctggcgatagtacctttttctttgcagccgccaatttgctctgtagggtttcttcagacattgcagggcaggaaggaatgtggggttggggccacgtcagctagattgcggcttaccactggggaacaattcctgtcggccaccgcgcaactgtgcgactgaccagaggaggcgtaaccagggcctactacagcgcagaatagggggcgtggccgccatcctccaagtccattggtcgatgagaaagatgacagagaaaggaggcgaggccaggcagcagcgcgtccaggtgggtgtgaggcgtcacaaggaaagctgagcaggcaattgctgccccgcccactctgggaagaggggcggggccgcccgctccagagggacggaagcggcggggccgccggatccagggacaatggggtggggcgggctttccctgggtgggcgcagcggcttcctgggtccccctcacgctctgggtcagagttcctttacaggcggacctgagaggcaactcaccgactcctgccctggaccctcctgcgccactgaaccccctgacctgggagcctcggaacctagggctcaggaggtgggtgaggaacggactccacagtttctttcctgactcctcacagccctgccccagaccttcccttcccagaaatcacctccaaggacccctaatcaatgttccagacgcctacctctcggaacgccccattcctagagggtccctaccctgattccgggagcacatttgcccccctttccagctggatccagtcccgggctctcctgcttcccagctcctcctcccgcacccaacagcacccctttcctctcagagcggccgtgggtcccatcaggctttcccctcggatcctctgcagatgaaccaggacttatccgaaggtaccaagtgaacttctaggaaaagtccaattctcagatgctggatgtcttccaaaaatgaagcaaattagtaacttagtagctgagtcaactaatcctgttagatggtcaacactggtttttttattttaatatttttaagtggcaactctagtgtgtgagaaaattaatgtgacagctgaatttgtagaaagctgctttgactctcttgggccccttcataagccctggaactaaataaaagtctagtgaatacaggtaagctcccttctttttctccatatttacccctcacttcaactataatttcacaggtccctttttccacattcaaggtggttgataataaagtgggaatgtacaggattctctttaatcctgaattagcaatccaaaaattagaatttgttgcattcttagaactacggtcagggttcctgagcaggtactcaagcagacacaaagacaaaacttccattttatttcagaagaacctccataatcccatgcattaattcccatcataaatcatctcatctcatccatctatctttcatctatctatcatctatctgtcatctgttatctatcatataacgataattcatctatcatctatcattcatctgtctataatccatctatttatcatctatgtatcatatatcgatcattcatctatcatctatcatgtattgatcattcatctatctgtcatctatcattcatctatcatctatcattcatctatcacctatcatctatcatatatcgataattcatctatcatctatcatattcatctatcatctattattcatctgtcgatcatctatcattcatctatttatcatctatcatatattgataatctatcatctatcgtgtatcaatcatctattatctatcatctatctgtcatctatcatatattgatcatctatctatcacctatctatctatatatcatctatctatttattatctctctctctctctcctctattagtactgtttctttggagaacccctagtacatatactctttttcctggctctttgagtataaggtgatttgctagggttaagaatgtagcctcctggtaggctgcagcgagttgagatcgcaccactgcactccagcatgggtgaaagagcgagacttcatcaaaaaaacaacaaaaaaagaatgtagcctcctgtaaccactagctcattccttatttaaatggatcccccccaccctcccagagcgccacactttttgtccattgatcatttgtcttgatatacttgacaaatgtcattgtcatgcatgaaacacctccgtagccaatagtatgtgtattaaaaataacgcttcttcctcttccactcaaaagagaattctaatataatggttatatataaggaaaattttaaatctgagtttactttttaaattatattaaaacattcacaaagtgcaacactttattttttataacagattatttgcaagttacccttaccacaaaataggacagtccattgtgtcctatctaatgcaaagattaaaataaaagaaatatacttcagcaaaaagaactatagtcaatgaatgctgtttgtcaggaagatataagttcatataaggaagtttgtttctgattattttactctagggtgtaaaaactcctcaacaaaaatcagtttgtactggaatacagtctgtcatgtttaagtcatagcagctgagccaggactatattcttcactacatcaagtaggatgaaggagctccagaaatacttttgaagcaggaatttaaagtgcggataggatggctaccatttaagtgatatttaagtttctcccttatgaggcttgcaaggccctttggaatctgacttctacatccttcctttccaacatcatatctcatcatttccccttttccctcctctaacaacctccattcatccacatcatgcacttcagctattctgaacttccctcctgaaaccagccactcacagagcaacacttttcaaatcctggctctacctgtgtaacctgaggcaggtttccaaattctgtgtgtcccagtttcctcatcctcattcctaaatttggaacaataacactcaagtcatagggtcactgtaaagatcaaatgagattacaactactcatgtgaaattcttagcatagtacctttcatttaggatatgcccccaaaatactggttgttgttaacagtgttgatgtgtctgctcataacactcattcccctcctcacctccttttgtatacttagttcctacacatctttcaaacatcagcttaaataggaaaccttccccaaataactcctccctacctaggtgaatattcctcctgtttgtatgaccgtaatccctgcacatcccatatcaaaggacttaatgtcactttctgccatctcttgtatgttgttcatattttttcattatactgaaagctccttgaagacaagtgctacatgtattgggatctgcatttcatctctatcccctgtcataacacttgctacatattatgccttctatgtttgttgaaaaaaaatgaatgaatgaaactcagctggcaagggaaagttactttggctttcatttagatttggggttttttgttttattttcaacatagtcatgagctcttctgctaaaagataaaatctagacatattcaattttacagagtttaattaagcaaagaacaattcactaatggtgcagtccctgaaacagaatagattcagagagagtccaggactagatggtcaaagatttatggacagaaaaaaggaaaatatgcagaaaacagaagtgaagtacagaaacagtaggattggttccagcttggcgtttgccttacttaaacatgggttttcaaagttggctgccttggattggctgaaactcagtgattggtacaagagtaggtgacagcctgtttacatgtctaattaacttacatttcaccatgtacaaagaaacctttaggctgaacttaaaattgtaaaattgtttagctgtgggctaaacttaatgtcacatttctagatcgtgttcaattagctaaccataggcgtcacttctcttctaccctccaaaaccactaatgctgctgcaaaagagaacttccagcagctgtttacctggaaacaagttgaaaatgtatttgaaatggaagccactagaattgtaaacacttctgtcatctttctcctttgtgtgcctctgcagataaggctgctccagtgcccccaaatttggaccttatgctctgtagtttcctgttataaccaatttgctatttgtgttaccaaagtatatttagtagattttatttgaaaaaagaaataaagttagaaaatattgacagtattacataacataagttctttgtttaaatttgtcatatttaatttttgaaagctaaataactaaaatctcatttctactaaattattctttttttcatgctaaggctaaatgtgagagctaacattttacaaaattttgtgtttttctttcaaaatacatgacaaagcacaaaagcatttttatcaggattaaagtaatttatggaaaatctaactctacgactatgtaagtgatgatctagttatattacaatattatgttgttttaatatccattattattgtgtgttaagtgctttccttgtctctatcgtaaagttacatacatagtaagcaattataggtataatgcttacaactgtaatgatgaataataaataatgacatttgttaaaccccagatattcatttatttattcaggcaatatttattatgtatcagatactgtgctaagcaatgagtatatcatgatgaacaaagaaatgggactggactcttggaacaagatgaaaacattacaggaataagcctaaaacacatttatatagttataattataaatcacaataaaacctacaaagaaaaaaaagacactaaaagagatcatagcagagggaatctaatttagattggaatgccaggaaagtctttccaaggatatggtattgtaaattaagctaaaaagcatgaaaaccaattctacacaaactattccagaaaatacaagaggagggaacactgcatgaaaatcattcagtaaggccagcactctactgacacccaaaccagacaaagatactacaagaaagaaagcaaggaaaggaaactcccaataatattcctcataaaataggagacatagtattgaaattgatgtgaaaatcctcaagaaaatatgagcaagttgaattcaggtataaaaagaagataacatgctatgattaaatatatcaggaaatgtaaatctggttgaacattttaaaatcaatagatgtaatttatcgtattaacaggtgaaagcagaaaaccatataatcatcccacaggatgtagaaaaaatatttgacaaaatttaatatccactcatgataaaatctctcagcatagagggatagtggagaacttcctcaacttgatagtgagcatctctgaaatacttctagctaacttctcagttagtaaggaaagactggatgctttctctctgaatgcgagaacaaagcaaggatgtcctctctcacaacttatattcaagattttgcttgaggtccttgtcagtgcaataaaaggaaaaaaaaaatacaataaaggcatccagattggaataaatgaaataaaaacaaaattgtttttatttttagttagcatgattgcttgtggagaaaaatctcaaagaacttaacaaaaacttagtagaactaataagcaatactatctagagtgaaagaaacaaggtcaagtttattttgtaccctgtatttctgtatttctgttttatttctgtatggcagcaatgaacagttggaaattaaaattttaaaacagcatcaaaaacataaaatgcttagctataaatctaacaaaacatatacagattctgtgccaaaaactgtaaatgtctatttaaaaaatcaaagaagagctgaacagagagctacatcatgtctattgttggaaaattcaatagaattaagatacaaatttcctcaaagtgatctggatgcaacacaattccattcaaatccaagcagacatttccttttaaaatccacaagctgtttctaaattcacacgaaaattcataagaataaaaaagccaaaatacttctgaaagagaacaaatttagaagactcctactatctgacttcaggatttattataacacagtgtaattctggtgaaaagacagacatgtagattaatgaaatagaatagatactagaaatacagtaactatacacaggcaatttttcacaaaaatgcaaaatgcaattcaatagagaaagtataggtttttaacaaatggtgctggaacaattggacatctgtatataaaaaaaagagttttaattcataccttgtatcatataccaaaactaaaatagatcgtattcataaatataaaactataaaacacatagaggagaacctacaataaaaatctttgtgaccttaacttagacaaaaatttcttggacatgacaccaaaaatatgatccataaaattatgataaattagacattatcataatttaaaagtttttgtccaaaagatactgttagaataaaaacacaaaccagaaacttggagaaaacatttgcaaaacacaaatctaataaagggcttgtatccaggttatgtaaagacctcttgagctcaataataaggaaacaaataatttcataaaaatacataggcaacagatttgagtatagagttcaacaaagaagatataaggatggcaaaaaagctcataataagatgttgaacatcaggtgtcattggagaaattaaagccacaatgatataccattatattctattaaaagagcctaaatttaaaaaaaaatttttttaaatgacagcaccggccaggcgcagtggctcacacctgtaatcccagcactttgggagtccaaggcaggtggatcacctgaggtcaggagttcgagaccagcctagccaacatggtgaaaccctgtctctactaaaaatataaaaattagccaggtggggtggaagacatctgtaatcccagctactcaggaggctgaggcagaagaatctcttgaacctgggaggcggaggttgcagtgagtggagattacaccactgcactccagcctgggcaacaaagtgagactccatctcaaaaaaaaaaaaaaaaaaaaatgatgacagcaccaagttctgaccaggatatagtgcacctggaacactcatacattgctggtggaatacaaaatggaacagccattttgaaaaacattttagcagtttcttatacaattgtttattattagtagtagtagtattgggatagggtcttgctctgtcacacaggctggagtacagcggtgcgatcacagttgaatccagcctttacctcccgggctcaagcttcctcatgcctcagcctctggagtagctgagactacaggcacatgccaccacacccagctaagtttcttaaaaattaaacacactttagcataagacacagcaattttactgctaggtatttatcccggagaaatgaacatattatgtccgtatacaaacctataagcaaatatatacataatgagtttattcataatatcaaaaactggaaacaactcaaatgcctttcaactggtaaatagataaacaaattgtggtggatctgtgcaatgaaattatactcagaaataaaaagaactaccaatacccacaacaatctggatgaatctgaaatgtataacacttagtgaaagaaaccagattcaaaaatttatatacttgtttaatcacatttacgtgtcactctggaagagatcattgtttggcaagggctgggaatggagtgaggagttaattagaaatacacgcaaagtggcccggtgcgatggcttacgcctgtaatccagcactttgggaggtcgaggccggcagatcacttgaggttaggtgttcaagacagcctggctaacatggggaaagccagtctctactaaaagtacaaataattagccgggtgtgatggcgcacgcctgtagtcccagatactcgggaggctgaggcaggagaatcgcttgaacccgggaggcggaggttgcagtgagccgagatcacgccactgcactccagcctgggcaacagagcgagactctggctcaaaaaaaattaaaataaaaaaataaaaaaattagccaggtgcaatggtgcacacctgtggtcccaactacttggaaggctgaggtgagaagatcacatgagcccaggatgtcgacgctgcagtgagctctgattgttccactgcactctagcctgggctatagagcaagaccctgtcttaaagaaaaagagagagaaagaaagaaagaaaaaagatagaagaaaaagagggaaggaagggagggaaggagggaggggagggggaagaggagaggaggaggagaggggagagggagcagaggggaggggcggaaggaagggaaggaaatgaggcttggaaccagagccatggaactctgttcttgatggcggcatctccctcatcaagtcggggcgtccatctccctgctggctaaggaggctcccaccccagtggagggcaggactcacctctggcttcagtgtcaggaacatggttggctgcgagtagacggtgggaagatggatagatatttgctggcccaatgaaggagtgggggttgtgactaaacacgatgcctgatcctcttctggggctccagctggcacccggagctgaagagaaaggctttatgatgaaacttcccttctgccaaaaataaccagtgcaagctgggcatggtggcacaagtctatagtcccaactactcaggaggctgaggcaggaggactgtttaagcctgggagcttgaagccagtctaggcaacatagcaagactctgtctcttttcaattaaaaactattgcagcttcctcaatcttccccggcagcctggggtggggcgctctgcttttcagagctgcctccagaacttcatccttcctccttccctcctccaccctcctcttcttgtttccatcacagccccgccaccctcaagccacaccccattgatcatttgctaaagattttagtacctggctctggcctgctttccaccgtcaacactcacatcaaggcacctggatctcttctccgccggcaatcctgccttccgccttcaggtatggatgctgtcaggagagatctccatctgctcccaaggccaagtttcccaacaccctgcagcaaggtctgccctccctcctagcattgtagatgggcctgccagggccaggactaggatgaaacaggccagcaaggcacccagggcataaaggttaaagaggcactcatccccagggtcataccagtagagagtcggcacctgagaatgagtgcctcctcaattttacacttgcttgccttgctgtagtcccagctctgggacctaccttatgaacacaaggctctggtcccctcccacttcctcagggctgtctcttttgtggcatccctcccatcagctgcaaacagatcctgtgtaaataccaccatacaaagccggccttgacccactttgccctccagctattgctccattcttctgttcttttttctttctttctttcctttttttttttttttagggtttttttttttttttttagtttttgaccaggtcttgctctgtcacccgggcttcagtgcagtggcatgatcttggctcactgccgccttgacctcctgggtccaagtgatcctcccacctcagcctcccaagtagctgggactacaggtgtgtgccatcatgactggctaattttttattttttgtattttttttttttgtagagacggggtctccccattttgcccaggatggtccgaactcctgggctcaagcaatcctcctgcctccacctcccaaagtgctaggattataggtgtgaaccaccatgactggcccttctttttttttttttttttttttttttgagacggagtctcgctctgtcgcccaggctggagtgcagtggcgggatctcggctcactgcaagctccgcctcccgggttcacgccattctcctgcctcagcctcccgagtagctgggactacaggcgcccgccactacgcccggctaattttttgtatttttagtagagacggggtttcaccgttttagccgggatggtctcgatctcctgacctcgtgatccgcccgcctcggcctcccaaagtgctgggattacaggcgtgagccaccgcgcccggccatgactggcccttctgttcttatttctagcaaagctaaagtcatccacctttgacgtctctactttctctccttccagtctccccaagaagttgctcttgacctccacccaacagcacagcctgttgttgattcagtgtctcccatccaacatggctgtggccccagccatcctcccagcctcctgccttggtagatgctatctctgcccttagttctcatgccctaattaatagccgggctgtgggtgctaagaggtacccagctcctcctagctcagaatccagtgacaaatcttctttatgttaacagggcaactccttccaaatccctgggctgctgtgtatgactgctggggtgaacgtcgccatgtactctaccccttactgtgctatcgttcagaggtcttgtcattgatgatgattaaggaaatcataaaaatgttaaacgaaggccaggcattgtggctcacgcctgtaatcccagcactttgggaggctgaggcagaaggatcacttgagcccagagctcaagaccagcctgggtaacatagtaagaacctgtctctacagatttttttttttttttttttcagctgggctggtggtgcatgcctgtagttccagctactcaggagtctgaggtgggaggattacctgagcccaggaagtcaaggctgcagtgagccatgatcctgccactgcactccagcctgggtaataaaaaccagcctgtttcaaaaacccaaacaaataacaaacaaaaaaaatgcaaaatgaagaaagagtcgtctcaggagcacgttcctctgtgtgtgtgaggaaatgttacatatatagtatatgtagagcgacagagactcacagagagagagaacgagtctaaagcagaagctaaaagcccaaggaaccaaatgcaatgagatgccactaaatacccattaaaaataaatcagtcagtcatgatggctcacacctgtaatcctagcaatttgggaggctcaggcaagaggatcacttgagcccaggagttcaagactagcctgggcaacataatgagatcccatctctacaaaattttttaaagtgcctgcagtcctagctactcaggaggctgacgtggaaggattcctttgagcccagaagtttaaggttacagcgggctctgatcgtgccactgcactctagccttggtgacagagccagatcccaattctagaaaaaaacgaaaactgaaaaagtcagatttaaggcccacaagagcaaatgttggtgaggataggaagcatctggaaccttcataggtggctgatggggatgcaaaaatcatacagtcattttggaaaatagttagacttttttttaaaaaattctacttatttattggctagtgtagatctttatttatttgtttgttttgagacagagtctgctctgtagcccaggctggagtgcagtggcgccatcttggctcactccaacctccgcctcccaggttgaagcgattcttgtgcctcagcctcccaagaagctgagattacaggcatgtgctaccacgcccagctaatttttgtatttttagtagagacagggttttgccatgttggccaggctggtctcaaactcctcgtctcaagctgtctgcctacctcggcctctcaaagtgctgggactacaggcgtgagccaccctacctggcctagtgtagatctttaaatacgaggtattttctttaaaagttaaacacacactcgccacatcacccagcaatggtgccatgtggtgaatatccattcaggtatctaggtatctgcgccaaagaaacgaaagactgtctgaaaatgttcaaggcagctttataaaaatacccaaagaatggaaatcactcaaatgtgcatcaactgatggatggaaaaaatgggagtatattggccaggcacagtggcttacatctataatcccagaattctgggaggctgaggcaggaggattgtttaagcccaggagttcaagaccagcctcagcaacatagcaagaccctgtctctaaagaaaaggaaagatggtctggaataccactcagtgataaaagaaaagaactactgggctgagcgcggtggctcatgcctgtaatcccagcaatttgggaggccggggggtgcggatcacctgaggtcaggagttcgaaaccagcctggccaacatggcgaaactccatctctactaaaaatacaaaaattagccagtgcgctggtgggtgcctggaatcccagctactctggaggctaaggcaggagaactgcttgaacccgggaggtggaggtggaggttgcagtgagctgagatcacgccattgcactccagcctgagtgacagagtaagactacacctcaaaaaaaaaaaaaaaaaaaaagaaaaaaagaactgaactactggttgaatctcaataacacgattgacagagccaatcacaaattattttatttatataattactattattatattaatttataatttatattatttcatttatattctagaaaagggaaactatagcaacgaaaagcaatttggtggttgcctagaagtgtgggtcaggacaatgactcactgcaaaagggtgtgcgggaatttttggagtgatagaaacattctaaaacttctcgtgatggtgtttgcatgtcttatacatttactcaaagtgatcaaactgtacacttaaaatgggtgagtttaggctgagcatggtggctcacgcctgcctgtaatcccaccagtttgggaggtcaagatgggaggatcgattgattccaaaagttggagaccagctgggcaacatagtgagtcttcgtccctacaaaagaaaaattttttaaagttagccagccatggtggtgtgcgcctgtggtcccagctagttgggaggctgaagtgagggatgacttgagtccaggaggtggaggctgaagtgagctgtgatcgtgccactgcattccagcctgggtgacagaataagacttcgtctcaaaaaaaaaagggggggtagggggtaagtttaattgtaagttattttaccataaagctgttaaaaaataactattaagtctaaacagtaatcctggaaacccactttgggaacagagacatgcatgcagcctgtgctcaaaaaatgctttcagactgtcggggaaacattatgcaccagtcagtgtccactaaaaggaaagcctcttccctccctcaagttcgagtcagcccaggcttaatgttatccttgtctgccacctggtggtcaaaatgggccatgtcggtgtcctggtctttcaccccaaactccatgaggctctgtggttgggctgaaaagccgtggatggaaagaaggggaactttacccctggaaaactggttccctgagaggcaagttggtcagaggtacgggcataaggggattactaggggtctatgggacaggaatacagcctcttaatgacagagaaaatactttggtgcaaccaagaggccgattgaacacaactcacccacctttgcacactgagataaaatatgggaaggttttttgcaaagaggggaaggagaaaagtttagggacaacaatgagctaagtaggaaaggtagtcatgtggacaccgatggtgagttcggggatgctcagaagattgacaggttagcaggggattctgaaaggcatggatgggacacttcaagatatgttgtttcaattgataaagatgcataaacctaacattgtgcttattggctacttaaatattggtgacatactgcttcctcaataataaggattatagcaaacttaattatagtttcctaaaaccttttatctggtggaaatttctattaattatcaagaggccttaaaataaacttcaatacacataaacccttgtattcattttaaatctatccaacctacaaaaacagaagagcatattggccacaattcaaggccatgttacattggaaaaacattctctatcatgtggcctggcacaagggttggcagcaacagagcagacagaaccaaaggaagaagggcctgaaaaacccgctagtgcatttgggctggcattttgttacaggaggttctgatccaattttaaattctgtattgcagtctagtgaggcagcgagagttcattatcccaaccgcaacctacagtctaccaggagacatgcgacccaccagctggtatttgaaacaatatagtttagtgcctaactgctcaaagtgtggtccctggctggggagcatcagcatctcctgggagcttgttagaaatgcagaatttcaagcctttcgtggatgttatttgttagctagcctacaaaacatatgataataattcataaacatgcactaaagtgaaaaataaacactcacctacacacaggcacacacacaaacatagggcttgctaatactaactgcaaaatgttttatccaataaatgatgataaccaatttgttttcaaaatgagaatgtaggatttgggtacccatttctgtgtaactaaaaataacaaaattcgatggcttaaaataattatttaacatgaatcatttctacaggttaaaaatatggaaaggccttggctcagtgattctgcacgcagtcaaatagtatctgggactggaatcacctgcagtctcactcattgacatggccgaagtggcacctgcagcctctctctctatccttatgtgatttttccatatgggctttccagcatggagtcctcagggtagccagactttttatatggcagggaaggtggtcttctcattctatcagaaatgaaagtgatatttttggcctctctcatttctcttctatttttcaacttgtttaggacctgggcaggaaatacagctgctatttgctagactagtgccttatagtctcaacactttacaatgacttttctttcattcccatggtatcttcccacttggggccctgcgttgcttggtgccctagtacacccatactcttatctccccagcccctttggggcgtcagtctgcagacttactccacctgccccccactccactagaggacccaacagcaaccctgtggcttctgtcacgcccttggctatctgctcatctcctgctaacactccaaatcctgagtattaggcagcactaggagattgcttcattgcctaggactccaaaaggggaagtcctggattgatgtggagcagcctataaagtttcccaggggatgtgaggtgagagaatcaacaaggagtggttgagacataagtataatgaggagagaagagcatgcccctcctcatccccacccacctgtagttccaaaagaaggaaaccttttttctttatctcttgaaagaagacaaagttgtccaatttaatgacatcacgtatataacagtgaaatgtcacaatattctttgtgctgcaacagtatcaataactagtgaagccatatgaccaaccaccatcacaggaagccatcagtgcctttcaaacaatgttttcatgctatgcttgaggccaaagagcaggaacctcggggagaggtagagggagtgaaatgtatccaaacctgtgaagatactacagccaacctcagcctaaaaacacacaggtgatactctgcctgccagataccaggtttctcagagctgggagagtaggtgagggctgtgagacccttaactctgactcaggagcagaggaatacatctctggttttcacagcatcagtgacaatttcctgagcagtggtgggcctggctgcagaaaacgggagccgcacacctcacgcacacacaacagtgcacaacagtctgcctggggcagaagaatgcagcgacctgtgctcccaaccacacaaatccctgaaggtactgctggtgcccagctgtcattcaaggcaatagacacactagcagggacagaggcagcaaaacgagtttcctaggtgatggcagggcaggcagcctgaggcatatctcagccagctaggcacagaaggaaaaagctgaatgactctaaagagaaatcaccccttttgtactaaagggagagaattagaagggttacagctcagaatgaatcccatttacaatcgcatcaaaaagaataaaatacttatgaatatatttaaccaagtaagtaaaagaactgtacagtgaaaactataaaatattaattttaaaagatttaagaagacaaatggaaagatacactgtgtttatgacaaaatcatgacctttacagcaacatggatgcagttgggagccattatcctacatgagttaacacagaaacagaaaaccaaatatcccacattctcacttataagtgggagctaaacattgagtacacatggacataaacatgaaaacaatagacaatggagactccaaaaggcttaagcgagtgggatcaagggttgaaaaactacctgctgggtactatgttcactatttgagtgatgggataccaagcccaaacctcaacattatacaatatattcatgtaacaaacctgcacatgtgccccctgaatctaaacaagcaaacaaaaacaaaaccaataaatggtttatgttaaagagtaaaagaaattctgaggtacaaaaaaagaaaggatatactgagttcatggattggaagaattaatattgttaaatactaaccaaagtgatctacagagtcaatgcaatccctatcaaagttctaattgcatttttcacagaaatgtaaaaaaatcctaaaattcatatggaaccacaaagaccctgaatagctaaaacaatattgaaaaggaagaacaaagctggaggcatcacacttcctgatttcaaattataattcaaagctatagtaatcaaaacagtgtggcactagcataaatgtagacatatagaccaatagaacaaaatagagagcctggaaataatcccacctatagtaacaaatttttggcaaaggcaccaaaaatacccaataaggaaaggatagtcttttcaataaaaggtgggacaactggatatccatattcaaagaaatgatattggacctttatgttacgccatacacaaaaaccaattcaaaatggattaaagacaagtgtaagacctgaaaccattaaactccttgaagaaaacatgggaaaaactccatgacattggtcttggcaatgacttgttggttatcataccaaaatcacaggcaacaaaagcaaaaataaacaaatggaactgcatcaaactaaaaagtttctacacagcaaagaaaacaatcaacaaaatgaaaagacatatggaatgcaagaaatatgtgcgcatcctctatctgataagtagttaatatctaaactatcttaggaatacagctctatggcaatagaacaacccaattcaaaaatgagcaaaggacctgagtagacatattcccaaagaagacatacaaatggcaaacaggtatatgaaacgatgatcaatatcactaatcatcagagaaatgaaagtcaaaaccacaatgagatattacctcacacatgttaggttggctattaccaaaaagtcaaaagataagtgttgggaaggaaatggagaaaggggagcccttccacaccatcagtggcaatgtaaattggtgtagccattacagaaaacagcgtgaagaaaacagtagttttctcagaaaactaaaaatagaaataccgtaggatccagcaattccactattgggtatatacccaaaggaaattaaatcagtacgttgaagaaatgtctgcactcccatgctcattgtagcattatacacaataaccaagatatggaatcaacctaagtgtctggtgacagatgaataggatggtatgtatgtatacaatggaatattattccaccttaaaaagaaggagatcctgccagctgagacaacatggatgaacctgaaggacattatgctaagtgaaatagccagatgcagaaagacatgtactgcatgaactcacttacgtgtggtaaaaacagatattagaatgatggttattagggactaggggtgtgggaaatgagaagatgttagcctaagggcataaattttcagttataagataaataagttctagagacctaatgtacagcacgtttaatagtaatgcatacttgaaatttgctaagatagtagatcttaagtattatcaacacaaaaaggaaggcaaagttagaatggcggtcattaaaaagtcagaaaacaacagatgctggagaggatgtggagaaataggaacacttttacactgttggtgggagtgtaaattagttcaaccattgtggaagacagtgtggtgattcctcaaggatctagaactagaaataccatttgacccagcaatcccattactgggtatatacccaaaagattataaatcattcaactgtaaagacacatgcacacatatgtttattgtggcactattcacaatagcaaagacttggaaccaacccaaatgtccagcaataatagactggataaagaaaatgtggcacatatacaccatggaatactatgcagccattaaaaaggataagttaatgtcctttgcagagacatggatgaagctggaaaccatcattcttagcaaactatcacaagaacagaaaaccaaacaccgcatgttcttactcgtaaatgggagtttaacagtgaaaacacacggacacagggaggggaacatcacacaccagggcctgtcagggggtggggagctgggggtgggataccattaggaggaatacctaatggaggtgacaggttgatggggttgatgggtacagcaaaccaccatggcacgtgtatacctatgtaacaaaactgcacgttctgcacgtgtaccccagaacttaaagtataataaaaaagggggggacaaatatatgaggtaatagatatatgaattagcttgattgtgatgattatttcatgatgcatatgtgtatcaaaccatcacactgtataccataaacatatacaatttttgtttgtcaatttttcttcaatagcacctagggaaaaattaaactttgatgctattgatttttttccatctgtacccatcggtggtcttcttggagagaaagaagaaaacttgggaacattgccattttctaacttctgacataaaatgctttcttcttctccaagtattttggtggattgagttgccttagtctgggttctgccagaaggcaactctgagacaagatttatgtgccaatagtttacttgggaggtgctacaggaaaacgctggtagggtacagagaaaagaggcaaggaagggaaggaagccgagggcatgatcatgccagtttccaccataggcaattggagcaccaggaattggtacagaacactcacctcacagttatcactcaaaaggtgaggtaggtgggcatttttccaccaatccacatcagtgactggttgagaaaaataatttccctttcctggaagcagtaatttccctttactttcagcctcccgagcaatcaaagagaattcagacaaaaaaaaaaccaaaaaacgaaaggtgttaacagtttgccgacgacctgggtgcatagaaatgtaacttgtttactacaaaagtcaatttctgtcttttcaggtgactcagtcttttaacaatgcaaaggctcttcccctaattcctgcagttctaaattactgagtgccccattctagaatagtgtgagactcaacttgatctttcaggcaagcttacctgcactgttgcttaggcctggccagtccctctacagtcctttcctacccctattggactccctgggggaaatattaatcaatgaaacaagataggtccactagggaaagaaactattgatgccttttcaatatcataaaggcataaaacatctattgtttcagtctgacatgttaaggagagagaggaataaaactgaaaaataaacaaaaaacaactctagcatcttcgaaggagaaaatgatttccagtttagtgacacagcctcaaagacctaagcacaaacattaatggaagtacttacctggaaatcactgaaagggttttgtggttgtttttcttatgttttttcaaagtactctgtagaaaaaatcttgaaaagaaagcgctctgagatgtctacatcttaaaagaatagaatttttataatgcttatgacaactacttataaagtacatcagttaaaaaaaaatctcattgtgttttgctgtaataacctaaaagctgcttctgaaagtgcccaccagcccaggaagcagttcgtacactcagagatcacaactaagctgagaaggagcattgctgtcctcagacaagggctggggatgggggcaggagaaatgcaacataaaggcaggtgttttctttttcctgacccaaatgtcaggaagtgaaaaagtctacaaaacaatgttaactcatctgttcctcataatttgatttggaaaataattaagttgttattattaactccaataaagcacacagggagcctctgtgacataactattatgagattcattggactcaaactttgtaggactttttaactttgaagttgtaagcttgaggttgaaccaatgtagtatttctcactttattttttatagactttaaagccggaaaatgtactgaccttgggaatagcaagagaaagtacttcctttccctctcctgacaccaagtgatcccatccctgtgtttaggcctagtccaaccttctaagctgtgcgtcgcttccatgctttggagcattttacatatatttacccacttcatcctcaagacaataccattaagtatgcacgatcatcaactccattctacaaatgaagaaaccggcacagtgaaggtaagtagttttccctggtctcatagttagtaagggtagagcaagaatttgattccaggcagccctggagttcatggctcctagagattgtccttacctggcttgaccaacagtcccaggaaacaagttgtgaaggagacgcagtggattttattttgttgtgttttgtttggagggtttgtttgttgtttgataacattgatcttcatgtctccttaccctttctagaacttccttaaaatcatctaaagtctcctggcctgttgtcataggcctgaacattttctaaccaatgttatttaaacatttacatgccgtcttctccaggacactgtcttatttgtctttgtagctctcataggatttagtatccttgtttatacatagtaggttatatatatttttatgtgtgtgtagatttatatttatatgtatatgtatagttgtatgtgcatatggatgtatatgtatgtatgtatacatttagtatataccatgtcttaatcaattacacaatgttttgactctaccattctgcatgagaaaaccaagccatttctcacactcaaatttgaccatgcaaccacatgaatatgacagcactcgacatatcagacacattggaaaacattctgactttcccaaggtctcaggctatttatcaagctcaatacaaaaaagcatttcatgtacatgtgttttgaaacatttcagctgtttcatatcacatgctacttagaagtaggaaatgattgcagtatggttttaaaaatatggtacacaggtatttcttgtatttctataagtttcaaaagaaaatgacaattcaccaatttcttgctgaagacatgcgcataggcacacatggttttctcacctgcgcttatcatggtacctggttagtaagagtaaactctttagggctagtgagagaaggaagtaacatttcacaaattcgagaaagaaatgtaaagcaaaatagttaaaatagaggaatggaactagtaaagaaaacataagatactcttccaggaaaattattattattattattattattattttttgagatggagtctcgctctgtcgcctaggctggagtgcagtagcacaatcctggctcactgcaacctctgcctcccaggttaaagcgattctcttgcctcagcctcccgagtagctgggattacaggtgcatgccaccatgctggctaatttttggtatttttagtagagacaggttttcaccatgttggccaggatggtcttgatctcctgacctcgggatccacccatctcggcctcccaaagtgctgggatttcagacatgagccaccgcaccctgccgaaaattctttacactaaaaaatgataactcttgttactgtaagtttcttaaaatttcaatatagcaatttttagcattgtgcctacatagttcttaggacaaggaaggctacttctgatattctttgaagaatccttctatggatttttagatcctttttgtcaagaaatacctcaggtaatccttgcttagcaatgttttattaggtagagaacatggcagtatattttggatataatccaaatctacagtggggtggtacatgtgagaagtttgatacaacttaaaaagacctagtctggtgctcgctttggcagcacatatactaaaattggaacaatacagtgaagatcagcatggcctctgcacaaggatgacaagcaaatttgtgaactgttccatatgtttttgaacaatgataacacgtggaaacagggaggggaacatcacacattggtgcctgtcaggggatgggagacaaggggagggagagcattagtacaaattcctaatgcatacaggacttaaaacctaaatgacgggttgataggtgcagcaaaccaccatggcacatgaatacctaggtaacaaacctgcatgttctgtacatgtatcccagaactcaaagtaaaatttaaaacaatgaaaaaaaatactttaaattttaaaataaacttaaaatttacttagaaaacaaaaggcttagtctcaaattctagtccagactctgctaggcatgacctcctacattcctattgtccctctagagtaatgactttaatcaccaaaaaggggttgagtccgaagcttctgtagtttcttccttttctagaatgctatcaaaagcatctgattttggcagctcatattccaaatgtgccattaaagtcacaatttatgtgtctgactcaagtagattaataaagagtacagtcattaccacatgtattggatcaaaaaaactgtttactcttattttccctcttattgtattggcaacctacttccctaaattgactaaaactaatctgttgtttagaaagtcatgtagacataaattaggtgaggtaaagatggttttagtttagatccctaaatagggatcaacaatactctttttcctcctaacattcctggcttagtgacctgactttattttgactatattataaagcaaaggatatggtagttttagttaaattgttattataagctagtttggaatagtagtatcatataatgtgtgttcaataaaggaaattagtagacttgaaaacaattctttctatcctagagctcgtagtagaatagatttaacttattattttaagcaccttctaaattgttaataagatttgctgatgacaccctacacagtagcagtcagtcccccacggctaattttaaacatctgccttcataattaaacttattgtttatttcatcttaaaatgagaataatacagcacacagctatttcagaaatagatctatcactcctaaataattactagtcagagcattatcctacagataaagaaaatttatatcaataattcaataaatagatcccagtttcaagacaaatcacaatacagaccctgccatagactaaattgtgcttcttctccccgcaccccctcaccaccaccaaattcatagattgaatccctgatccccgttgtgactttatttggagatacaactgttactgaagtaatgaaagataaatgaggttatagggtggagccctgatcagacagtcttagagtccttataagtagagagaatgagaccagagctttctcctttgctctccactccaacagaccaaggaatgaccacatgagaacacagcaagaaggcatccacctgcacgccaggaagagagccctcacctgcaactgaattggctgacttcttgatcttggacttccagcctccagaactgtaagaaatagattttgttcttttctagttcctgacctcatcttccatcagcctcacctagctccctctgctccagctgtagagcctccttgctgtttgttgaatatgccaagtagttctttgccttaagatctttgcaggggctgttccctctacttggatttttttgtccctcagggtatctccctcatcctcttcagcctttgttcaaaactcaatttctcaatggtgattaccttatttaaaactgtcatctacctcctataaccacccctccagcatgactgatttacctgtcctgttctacttttgtttccatagcatttaatttacttatttattacagttatggtttattttgttttcccctaatagaatgtaaccttctacatcacaaagatttgtgtctgttttgttaatggttttgttcataggactaaaagagtgtctgacaaatagtaggtattcaaaaattgctgaatgaataatctaatataccacgaagatattaatatgttactaatcatctgaatatactaaaaatcacttataagtctaatcttctaatatagtaatatggtaatctaatataagttggtaagcatttgaagtgtcacaggtttccatggaagagacacatccttttgagtgtgctgactgagcattattgctagaggtaggcctctcacaggcctggttagaacagtcaggtattgctagacaagaaagcaataaaaaggaaagaatcttactgggcttcactgtggagatgaccagcaaacccatttggggatgcagtggtaatagcttaatgatcaaattgaggctgtgaatcagaattttaggtgaataacttaaatcaggatcatccagcaagtcttttgaaaaataaatccattggcctgatagattatgtgatggatcattaatctctggatgtaaaatttccagaaactgaggcatgagtacacagaggaaactgcacttgccatgctccccaaaaagaagagttcataaagtcaacatattcatcatcatgtatgtcaataaacatctttagagggagacttttgctctgaccctgggtgctgctgtgcccctgataacagatgaatttctttccttctgcaccacccccaaggcccgcaatctgtatggcatggacatattcatatggaagcaacaaaatttctcccacttcttccccggacacattgtttatcattttcaacttctacctaaagtgtggaatatatattttccttttaccaagacaaggtcctgttctcaacaatttgtttcaatggcccacaggggagaataggtgttttttcgcataaccacatgtgaaatgtggatttttctttcagcaatttctgacatatattttctctttctcttttctttgctttcgtgtctttcaaatctcttatggtgacacaaaattttgtgagcaaaataaaatgtctagaactcgtcaatgaaatttatttgaggataacttttttttaaactgtaatatatattttcatttcaattaaaatgtgaattccctttggttttcttcacttagagaaatgaaggaattttaatttaaatacgggaaagttctacattttttactatatactgtagtaagtactacgtgaatgcaaattggaaagggctatttccttaaaagtagaaatcatgcctggaaaaaaaattttttaaaaacttccaaattccaagcaataacaaagcatatgttaacactttctctgttaaaagttttatgttagtgtaggtggcttattacaaaggtctttctattggtttcagttgctaatgactataagcattgtcacctggttttgttatttcagaatgatgttgcagcatgttcccttacattacaacaatctctggccttttttctgagtcaaggtcaaggtaggaaacatcaagtttgaaaggaaaagggctactgcctactcttttaagcaagaaccatctttataaggacttaaagagtctcaaaatcatctcaaatattattaaaatgataggatatgaataataaataaaggttgtaatcaaaaacatcaggcaagatggcctagctatctaatgaaacaccaggctcttccatgagagctagtgactaggaagagccaagaggaggttaatggtacctctttagatcattcagcatgggctgtgtgacgtgattccatagtgtcttgcaatggccatcaacctctataggaaatggctaagtcacacaagaaagatgcatagcttcacatggtgtcagggagccccatacatgacttcagctgacaatgtattttagttcagtggttttcatcactgagctctaagatatagctaggcatgccaagaggaacaaactttcaataacttgaaaaaaaagtttttgtgtcttaccttgttgaaggctatgctcagtagcaatcttctaatacccacaggtgttagaaccactgaatcctgaatttgtttggatactgtgtgctctatagatttttttttaacttctaacaatctctgaaatgcatctaataatagatcttctgttactgactctagagtcaaggaaaattaagcatttcttccagatttggtctagggcaacttcttttaataagaggtgaagtcagtgaggtttcaatttgactttcagagtaattcaggttaatttatttttaaagagcacacatttggttgctatgtagggatttgcacacttgccgttatgggtaggatgaaaggaaatgggaatcatttctcccagaatgcttgctttcatgagttagactcagagtgattcatttcaccctattggtagtattcagcagagaaacagtcattgtactgttcagttcatcattgatatgaatttggctttagttacagagaaaaagatgcccacttaggtatatgaagggattgtgtcagtctcctaagagactcagaagggttaagcacagcttgaggaaaacccccaccatggcatttaggatctgaaagtccttagaggtgttgctatgccaagttcaagtccataaagctcacagcactttccacctgcttgagtccattcacccttagttttcaaccacacccaaaggcctcaggaagatgtatttttaactcctactacaccaagaaactgatctggctggctgtcatccattcccaaaactctttctgcctccaccatttctctggcaggaaatcctccaacgctgccttgctttaccatttaattgtgaactattcatgcatggccctccccagtgagtctgagggcctgtcaagtataaagtcagacctcagcttatgttggtggtttttcccctccttccctttacccctcccatagtgctttatcctgtgtacattttaagtaaattgctttactgaataggactataatcttttttttaattattattatactttaagtctggggtacctgtgcagaacggtgaggtttgttacataggtacacatgtgccatggtggtttgctgcacccaacaacctgtcatctacattaggtatttctcctaatgctatcccttccctagcctcccaccactctgcaggccccggtgtgtgatgttcccctccctgtgtccatgtgttctcattgttcaactcccacttatgagtgagaatatgtggtgtttggttttctcttcttgtgacagtttgctgagaatgatggttcccagcttcatccatgtccctgccaaggtcatgaactcatccttttttatggctgtatagtgttccatggtgtatatgtgccacactttctttatccagtctatcattgatgggtatttgggttggttccaagtctttgctattgtgaacagtgctgtaataaacatatgtgtgcatgtgtctttatagttgaatgatttataagcttttgggtatatagccagtaatgggattgctgggtcaaatggtatttctagttctagatccttaaggaatcactacactgtcttccacaatggttgaacgaatttacactcttacactaacagtgtaaaagtgcttctatttctccatatcctctccagcatctgttgtttcctgacttgttaatgatcgccattataactgacatgagatggtatctcattgtggttttgatttgcatttctctaatgaccagtgatgataagcattttttcatatgtttgttggctgcataaatgtcttcttttgagaagtgtctgttcacatcctttgcccactttttgatggggtggtttgttttttcttgtaaatttgtgtaagttctctgtagattctggatattagccctttgtcagatggatagattgcaaaaattttctcccattctgtaggttgcctgttcactctgatgatagtttcttttgctgttcagaagctctttagattaattagattccatttgtctattttggctttggttgccattggtcttggtgttttagtcaggaagtctttgcccatgcctatgtcctgaatggtattgcctatgttttcttctagggtttttatggttttaggtcttatgtttaagttcttaatccatcttgagttaatttttctataaggtgtaaggaagggatccagtttcagctttctgcatatggctagccagtttttccgacaccatttattaaatagggaatcttttccccattgcttgtttttgtcaggtttgtcaaagatcagatggttgtagatgggtggtgttgtttctgaggcctctattctgttccattggtctatatatctgttttggtaccagtaccatgctgtttttattactacagccttgtagtatagtttgaagtcaagtaacatgatgcctccagcttttttctttttgcttagggttgtcttggctacatgggctcttttttggttccatatgaaatttaaagtagttttttccaattctgtgaagaaagtcaatggtaacttgatggggatagcattgaatctatgaattactttgggcagtatggccattttcacaatactgattcttcctatccatgagcatggaatgtttttccatttgtttgtgtcctctcttatttccttgagcagtggtttatagttctccttgaagaggtccttcatatcccttttaagttgtattcctaggtattttattctctttgtagcaatagtgaatgggagttcactcatgatttggctctctgtttgtctgttattagtgtataggaatgctagtgatttttgcactttgattttgtaacctgaaactttgctgaagttgcttatcagcttaaggagatttgaggctgagatgatggggtttcctaaatatacaatcatgccacctgccaacagagaccatttgacttcctcttttactaattgaatactctttatttctttttcttgcctgattgccctggccagaacttccaatactatgttgaataggagtggtgagagagggcaccttgtcttctgccagttttcaaagggaatgcttccaatttttgctagttcagtgtgatattggctgtgggtttgtcatcaatagctcttgttattttgaggtatgttccatcaatacctagtttattgagagtttttagcatgaagggctgttgaattttgtcgaaggccttttctgcatctattgagataatcatgtggtttttgtcattggttctgtttatgtgatggattacatttattgatttgcgtatgttgaaccagccttgcatcccagggatgaagccaacttgatcgtggtggataagctttttgatgtgctgctggattcagtttgccagtattttgctgaggatttttgcattgatgttcatcagggatattggtctaaaattttctttttttgttgtgtctctgcctggttttggtatcaggaaaatgctggcctcataaaatgagttagggaggattccctctttttctattgattggaacagtttcagaaggaatggtaccagctcttctttgtacctctggtagaattcggctgtgaatccatctggtcctggaccttttttggttggtaggctattaattactgcctcaatttcagaacttattattggtctattcagggatttgaattcttcctggttaatcttgggagggtgtatatgtccaggaatttatccatttcttctagattttctagtttatttgcatagaggtgttcatagtattctctgatggtagtttgtatttctgtgggatcagtggtgatatccgctttatcatttttttattgtgtctacttgattcttctctttttcttgtttattagtttgctagtggtctattttgtcaatctgtttaaaaaaatgggtcctggattcattgatttttttaaagggatttttgtgtctctgtctccttcagttcatctctgatggtagttatttcttgtcttctgctagtttttgaatttgtttgctcttacttctctaatgcttttaattgtgttgtttgggtgttgattttagatctttcctgctttctcttgtggacagttagtgctataaatttccctctaaacactgctttagctgcaccccagagattctgctacattgtgtctttgttctcaaagaaagaacaaagaaaatctttctttatgccttcatttcattatttacccagtagtcattcaggatcaggttgttcagtttccatgtagttgtgtggttttgagtgagtttcttaatctgagttctaattcgattgcactgtggtctgagagactgtttgttatgatttcttttctttcacatttgctgaggattgttttacttcccattatgtggtcaattttagaataagtgtgatgtggtgctgagaagaatgcatattctgttgatttgggatggagagttctgtagatgtctattaggtgtgcttggtccagagctgagtacaagtcctggatatccttgttaattttctgtctcgttgatatatctagtgttgagagtggggtgttaaagtctcccactattattgtgtgggagtctaagtctctttgtaggtctctaagaacttgctttatgaatttgggtgctcctgtattgggtacatatatatttaggatagttagcttttcttgttccattgatccctttaccattacacaatggccttctttgtctcttttcatctttgttgggttaaagtctgttttatcagagactaggattgcaacccctgcttttttttgctttctgtttgcttggtaaatattccttcatgcctttattttgagcctatgtatgtcttttcgtgtgagatgtgtctcctgaatacagcacaccaatgggtcttgactctttatccaatttgccagtctgtgtcttttaattggggcatttagcccatttacctttatggttaatattattatgtgtgaatctgatcctgtcattatgatgctagctggttattttgcccattggttgatgcagtttcttcatagcgtcaatggtctttacagtttggtatgttttttcagtggctggtaccagttgttcctttccacgtttagtgcttccttcagggcctcctgtaaggcaggcctggtggtgacaaaatctctcagcatttgcttgtctgtaaagaattttatttctccttcgcttatgaagcttagtttggctggatataaaattctgggttgaaaattcttttctttaagaatgttgaatattggcccccactctcttctggcttgcagggttcctgctgagagatccactgttagtctgatgggcttctctttgtgaataacctgacctttctctctggctgcccttaacattttttccttcatttcaaccttgatgaatctgatgattatgtgtcttggcattgctcttctcaaggaatatctctgtggtgctctctgtatttcctgaatttgaatgttggccagccttgttaggttggggaagttctgctggataatatcctgaagagtgttttccaacttagttccattctccctgtaactttcaggtacaccaatcacacgtagatttggccttttcacatagtcctgtatttcttggaggctttcttcatgacttttcactctttttttctctaatcttgtcttctcgctttatttcattgagttgatcttcaatctctgatatcctttcttcttcttgattcatttggctattgatacttgtgtgtgcttcatgacgttctcatgctgtgtttttcagctccatcaggtcatttatgttcttctctaaacaggttattctagttagcaattcatctaaccttttttcaaggttcttaacttccttgcattgcattagaacatgctcatttagctcacaggagtttgttattacccaccttctgaagcctacttctgtcaatttgtcaaactcattctctgtccagttttgttcccatgctggcaaggagttgtgatcctttggaggagaagaggcattctggtttttggagttttcagcctttttacactggtttctccccatcttcatggatttatctacctttggtatttgatgttggtaatcttcagatgggggtctctgagtggacgtcttttttgttgatgttgctactattcctttctgttcgttagttttccttctaacagtcaggcccctcttctgcaggtctgctggaatttgctggaggtccattccagaccctgtttgcctgagtatcaccagtggagtctgcagaacagtaagattgctgcctgttccttcctctggaagctttgtcccagagcggcacctgccagatgccagcaagagttctcctgtatgaggtgtctgttggcccctactgggaggcgtctcccagtcaggacacatgagtgtctgggacccacttgaggaagcagcctgtcccttatcagagcttgaatgctgtgctgggagatccactgctctcttaagagctgtgaggcagggatgtttaagtctgctgaagttgtgaccacagtcacccccagggagatgggggttttatctataagtccctggctggtgcctttttaatcagagatgccctgcctagagaggcagactggcctcagcagccttgctgggctgtggggggctccatccagttcaaacttccctgcagctttgtttatactgtgaaggtaaaactgcctactcaaacctcagcaatggcatacgcccctcccccaccaagcttgagcatcccaggtggacctcagactgctgtgctggcagcaagaatttcaagccagtggatcttagcttgctgggctccataagggtgggacccaccaagccaggcaccggagggaatctcctggtctgctggttgtaaagaccatgggaaaattgcagtatctgggcaggagttcactgttcctcccagtacagtctctcatggcttcccttggctcggaacaggaaatcccctgaccccttgtgcttcctgggtgaggtaatgccccaccctgcttcagctcactctccatgggctgaacccactgtccaatcagtcccaatgagatgaactgggtacctcagttggaaatgcagaaatcacctgccttctgcactgatctcactgggagctgcagactggagctgttcctattcacccatcttgccaacaagttcctaggactgtcatcttttatagaaaaaaatgccttcagacagattggttctgtgactgtttataagtttatattctagccccatagacaaatttttcaaaaaagatcccaactgtaataacatttctcccaaggagtgattaaaaaccaaatctgaatggacactactgtcttactaatgggctgtggaaaatgcaataatgatgcttgtgaaattattagattcaggaataatgtattattctagaattgtgctaattcatttcccacttctgatcatttgaagtttacttctctctcattgaaaaggattaatgatatgtttattaaataaagactaattttattttatgttttttgtgtttttttttttgagatggagtctcgctgtcacccaggctagagtgcagtggcgcgatcttggctcactgcaggatccgccccacggggttcaagccattctcctgcctcagcctcccgcatagctgggactacagatgcccgccacctcgcctggctaattttttgtattttagtagagacggggtttcaccgtgttagccaggatggtctcgatctcctgatctcatgatccacctgcctccacctcccaaagtgctagattacaggcgtgagccactgtgctcggcccaaaaaagactaattttaaaagagctttgctggctcgactttatgtaaaaatagcatgaaagaaaaggagataataccatattttatgaaataccctctgagactcttctttgttaaagaaacaatttgtaaactgtcctgacattataaactctttgtcttcttagtctgacatgagggtgccaagcttagtgatttgtagcatggaaagatgagtgctgtagctggacactcgtagtcacacaaaggttctgttggtttggaaggtgagcgtttcatattcttgccccacaagtaagccaatgttccaccccagggacaagtatatttcctgaattatgagaaggagcaagagagcatgtccatcccatgttcttgagaagtcctggctcgagccaataaagctcatcgttgtctgaaagaatggagatcaatttcagtctgctgtcacacagactctggcagccggagatcaacaggatctcataacagtaaacctggtgctttccagggcagagccccaagttgctaacagcctctcagacttaaaaaagtaagttcacacagaacaattgtattctcacagtcagcattgtgatcttcctctggttcttcatatatttaataaacctttaaaaccagaatcctgagaaatgtcccatcccttcccacacaaacacatcagcctcttctactatgtactcatacacactgaccagcattttcttttttatcttaggaactaacagaatcaaagatatggagttttaaggttatcttttgaagcagacctttactttatgaagataattattaaagtatattgatactctgttgaggcatattgctccaggggtcttgacattttgttggtctaattatctgcagcaaatacggtatccaaagttcccagtgtggggaaaagaaagagagatcagattgttactgtgtctgtgtagaaagaagtagacataggagactccattttgttctgtactaagtgtcaggcctctgagcccaaggcaagccatcgcataccctgtgacttgcacgtatacacccagatggcctgaagtaactaaagaatcacgaaagaagtaaatatgccctgccccaccttaactgatgacattccaccacaaaagaagtgtaaatggccggtccttgccttaactgatgacattaacttgtgaaagtccttttcctggctcatcctggctcaaaaagcacccccactgagcaccttgcgaccccccctcctgcccactgagcaccttgcaacccctactcctacccgccagagaacaaaccccctttgactgtaattttcctttacctccccaaatcctataaaatggccccacccttatctcccttcgctgactctcttttcggactcagcccgcctgcacccaggtgaaataaacaaccatgttgctcacacaaagcctgtttggtggtctcttcacacggacgcacatgaaatttggtgccgtgactcggattgggggacctcccttgggagatcaatcccctgtcctcctgctgtttgctccatgagaaacatccacctacgacctcaggtcctcagaccgaccagcccaagaaacatctcaccaatttcaaatctggtaagcggcctctttttactctcttctccaacctccctcactatccctcaaactctttctcctttcaatcttggtgccacacttcaatctctcccttctcttaatttcaattcctttcattttctggtagagacagaagaggcatgttttatctgtgaacccaaaactctggcgccggtcacggactgggaaggcagccttcccttggtgtttaatcattgcagggacacctctctgattatacagtcacatttcaagggtgtcagaccacacagggatgcctgccttggtccttcacccttagcggcaagtcccgctttcctggggcaggggcaagtacccctcaaccccttctccttcacccttagtggcaagtcccactttcctagggggcaagaagcccccaattgcttatttccgcaacccaacctcttatctctgtgccccaatcccttatttctgcaccctgacctcttatctctgtgccccaatcccttatttccatgccccaaccccttctttgcttttctggagggcaagaaccccccgccccttctccgtgtctctactcttttctctgggcttgcctccttcagtatgggtaagcttccaccttccattcctccttctcccttagcctgtgttctcaaaaacttaaaaccttttcaactcacacctgacctaaaacctaaatgccttattttcttctgcaatgccgcttgaccccaatacaaactcgacagtagttccaaatagccagaaaatggcactttgaatttttccatcctgcaagatctaaataattattgtcataaaataggcaaatggtctgaggtgcctgacgtccaggcattcttttacacactcagtcccttcctagtccctgtgcccagtgcaactcgtcccaaatcttccttctttccctcccacctgtcccctcagtaccaaccccaagcgtcgctgagtctttctaatcttccttttctacagacccatctgacctctcccttcctccccaggctgctcctcgccaggccaagctaggtcccaattcttcctcagcctccgctcctccaccctataatcttttcatcacctcccctcctcacagctggtccggcttacagcttcattccgtgactagccctcccccacctgcccagcaatttactcttaaaaaggtggctggagcgaaaggcatagtcaaggtgaatgctcctttttctttatcccaaatcagatagcgtttaggctctttttcatcaaatataaaaatccagcccggttcatgacttgtttggcagcaaccctgagacactttacagccctagaccctaaaaggtcaaaaggccgtcttattctcaaaatacattttattacccaatctgctcctgacattaaataaaactccaaaaattaaattctgaccctcaaaccccgtaacaggatttaattaacttcaccttcaaggtgtacgatagtagaaaaaagtttcaattccttgcctccactgtgagacaaaccccagccacatctccagcacacaagaagttccaaacacctgaaccgcagtggccaggcgttcctccagaacctcctcccacaggagcttgctacacgtgccggaaatctggccactgggccaaggaatgcccgctgcccgggattcctcctaagctgcgtcccatctgtgtgggaccccactgaaaatcggactgttcgactcacctggcagccactcccagagcccctggaactctggcccaaggctctctgactgactccttcccagatcttctcggcttagcggctgaagactgacactgcccgaacgcctcggaagccccctagaccatcacggatgctgagctttgggtaactctcacagtggaaggtaagccagtccccttcttaatcaatacacaggctacccactccacattaccttcttttcaagggcatgtttcccttgcctccataactgttgtgggtattgacggccaggcttctaaacctcttaaaactccccaactctggtgccaacttagacaatactcttttaagtactccttttatttatccccacctgcccagttcccttattaggctgagacactttaactaaattatctgcttccctgcctattcctggactacagctatatctcattgccacccttcttcccaatccaaagcctcctttgcgtcctcctcttgtatccccccaccttaacccacaagtataacatacctctactccctccttggtgaccgatcatgcaccccttaccatcccattaaaacctaatcacccttaccccactcaacgccaatatcccatcctgcagcacactttaaaaagattaaagcctgttatcactcgcctgctacagcatggccttttaaaccctataaactctccttacaattcccccattttacctgtcctaaaaccagacaagccttacaagttagttcaggatctgcaccttatccaccaaattgttttgcctatccaccctgtggtgcccaacccgtacactcttttgtcctcaataccttccttcacaactcactattccgtgcttgatcttaaagatgcttttttcactattcccctgcacccctcgtcccagcctctctttgctttcacttagactgaccctgacacccattaggctcagcaaattaccaaggctgtactgctgcaaagcttcacagacagcccccattacttcaatcaagcccaaatttcttcctcatctgttacctatcttggcataattctcataaaaacacacgtgctctccctgccaatcatgtctgacctctcaaaccccagcaccttctacaaaacaacaactcctttccttcctaggcatggttagtgtggtcagaattcttacatagccaggaccacaccctgtagcctttctgtccaaacaacttgaccttactgttttagcctagccctcatgtctgcgtgcagtggctgccgctgctttaatacgtttagaggccctcaaaatcacaaactatgctcaactcactctctacagttcttataacttccaaaatctattttcttcctcatacctgatgcatatactttctgcttcctggctccttcagctacactcactctttgttgagtctcccacaattaccattgttcctggcctggacttcaatccggcctcccacattactcctgataccacacctgacccccatgactgtatctctctgatccacctgacattcaccccatttccccaaatttccttctttcctgttcctcaccctgatcatgcttgatttattgatggcggttccaccaggcctaatcaccacacaccagcaaaggcaggctatgctatagtatcttccacatctatcattgaggccactgctctgcctccctccactacctctcagcaagctgaactagttgccttaactcaagccctcactcttgcaaaaggactacgtgtccatatctatattgattctaaatatgcctttcatattctgcagcaccatgcagtcatatgggctgaaaaaggtttcctcactacacaagggtcctccatcattaatgcctctttaataaaaactctgctcaaagccgctttacttctaaaagaagctggggacattcactgcaaggggcatcaaaaggcatcagatcccattgctctaggcaatgcttatgctgataaagtggctagacaagcagctagctttccaacttctgtccctcacggccagtttttctccttcacttcagtcactcccacctactcccccactgaaacttccacctatcaatctcttcccacacaaggcaaatggttcttaggccaaggaaaatatcttcttctagcctcacaggcccattctattctgtcgtcatttcataacctcttccatgtaggttacaagccgctagaccgtctcttagaacctctcatttcctttccatcatggaaatctatcctcaaggagatcacttctcagtgttccatctgctattctactacccctcagggattgttcaggcctcctcccttccctacacatcaagctcggggatttgcccctgcccaggactagcaaattgactttactctcatgcctcgagtcagaaaactagaatatctcttagtctgggtagacactttcactggatgggtagaggccttccccacagggtctgagaaggccaccgcggtcatttcttcccttctgtcagacataattcctcggtttggccttcccacctctatacagtctgataatggaccagcctttactagccaaatcacccaagcagtttctcaggctcttggtattcagtggaaacttcatatcccttaccatcctcaatcttcaggaaaggtagaacggactaatggtcttttaaagacacacctcaccaagctcagcctccaacttaaaacagaatggacagtacttttacctcttgcccttctcagaatcagagcctttcctcgagaagctacagggtacagtccatttgaactttcatatggatgcactttcttgcttggccccaacctcatcccaggcaccagccctctaggtgactatcttccagtactccagcaggctagacaggaaattcaccaggctgctaatcttctcttgcctactccagatccccagctatatgaagacaacctagctgggcgatcagttcttgttaagaatctgacccctcaaactctacaacctcgatggaccggaccctacttagtcatctatagtaccctgactgccgtccgcctgcaggatcctccccactgggttcaccgttccagaataaagctgtgtccatcggacagccagcctaatccctcctcttcctcctggaagtcgcaagtactctcccccacttcccttaaactcactcgtatttctgaagaacagtaataacacttacgagcctaatacatcccttcattctattaggtctgttcgtccttaccctactttttgcaacagggctttaagaagtcaccccaccacttaggccaagccccaaaaaactagtcatccctactatcttctgtccggtcatactcctattctccattctcaactacttataaatgctctactcttgtttacaccgctggtttacactgtttttccaagccatcaaagctgatatctcctggtgctatccccaaactgccactcttaactcttgaagtaaataaataatctttgctggcagggctatgctgaatctccttaggcactctctaattagatgtcctaggtcctcccaattcttagtccttttatacctgtttttctccttctcttattccatttagtttttcaattcatataaaaccgtatccaggccatcaccaatcattctatacgacaaatgtttcttctaacatccccacaatatcaccccttaccacaagacctcccttcagcttaatctctcccactttaggttaccacgccgccccaatcccccttgaagcagccctgagaaacatcgcccattctctctccatatcaccccccaaaaattttcaccgccccaacacttcaacactattttatttttcttattaatataagaaggcaggaatgtcagccctctgagcccaagccaagccatcgcatcccctgtgacttgcacgtatacacccagatggcctgaagtaactaaagaatcacaaaagaagtgaatatgccctgccccaccttaactgatgacattccaccacaaaagaagtgtaaatggccagtccttgccttaactgatgacattaccttgtgaaagtccttttcctggctcatcctggctcaaaaagcaccccccactgagcaccttgcgacccctactcctgcccactgagcaccttgtgatccccactcctacccgccagagaacaaaccccctttgactgtaattttcctttacctccccaaatcctataaaatggccccacccttatctcccttcgctgactctctttttggactcagcccacctgcacccaggtgaaataaacagccatgttgctcacacaaagcctgtttggtggtctcttcacacggatgcacatgaaactaagaaaaattcttctgccttgagatgctgttaatctataaccttatccccaaccccatggtctctgaaacatgctgtgtccactcagggttaaatggattaagggctgtgcaagatgtgctttgttaaacagatgcttgaaggcagcatgctccttaagagtcatcaccactccctaatctcaagtacccagggacacaaacactgcagaaggccacagggacctctgcctaggaaagccaggtattgtccaaggtttctccccatgtgatagtctgaaatatggcctcgtgggaagggaaagacctgaccatcccccagcccgacacccataaaagttctgtgctgaggaggattagtataacaggaaggaatacctctttgcagttgagacaagaggaaggcatctgtctcctgcccgtccctgtgcaatggaatctcttggtataaaacccgattgtatgttccatctactgagataggggaaaacagccttagggctggaggtgggacatgcgagcaacaatactgctctgtaaggcattgagatgtttatgtgtatgcatatctaaagcacagcacttaattctttaccttgtctatgatgcagagacctttgttcatgtgtttatctgctgaccttctctccattattatcctatgaccctgccacatccccctctccaaaaaacacccaagaatgatcaataaatactaagggaactcagaggctggcgggatcctccgtatgctgaacgctggtcccctgggcccccttatttctttctctatactttgtctttttcttttccaagtctctcattccacctaatgagaaacacccacaggcatggaggggcaacccaccccttcatctggtgcccaacgtgggggcttttctctagagtgaaggtaggctcgagcgtggttattgaggacaagtcgacgagagatcccgagtacatctacaatcagccttacggtaagctcgtgcgctcagaagctagggtgacaatggggcaaactcaaagtaaaactaaaagtaaatatgcctcttatctcagctttattaaaattcttttaaaaagagggggagttagagtatccacaaaaaaaaatctaatcaatctatttcaaacaatagaacaattttgcccatggtttccagaacaaggaactttagatctaaaagattagaaaagaattggtaaagaactaaaacaagcaggtagggagggtaatatcatcccacttatagtatggaatgattgggccattattaaagcagctttagaaccatttcaaacagaagaagatagcgtttcagtttctgatgcccctggaagctgtgtaatagattgtaaagaaaagacagggagaaaatcccagagagaaacagaaagtttacattgcgaatatgtagcagagccggtaatggctcagtcaacgcaaagtgttgactataatcaattacaggaggtgatatatcctgaaacgttaaaattagaaggaaaaggttcagaattagtggggccatcagagtctaaaccacgagggccatgtcctcttccagcaggtcagatgcccgtaatattacaacctcaaacgcagtttagagaaaataagacccaaccgccagtagcttatcaataatggccgccagccaaacttcagtatcggccacccccagaaagtcagtatggatatccaggaacgctcccagcaccacagggcagggcgccataccctcagccacccactaggagacttaatcctatggtaccacctagtagacagggtagtgaattaccagaaattattgataagtcaagaaaggaaggagatattgaggcatggcaattcccaataatgttagaaccacctggagaaggagcccaagagggagagcctctcacagttgaggccagatacaagtctttttcgataaaaatgctaaaagatatgaaagagggagtaaaacagtatggacccaactctccttatatgaggacattattagattccattgctcatggacatagactcattccttatgattgggagattctggcaaaatcgtctctctcaccctctcaatttttacaatttaagacttggtggattgatggggcacaagaacatgtctgaagaaatagggctgccaatcctccagttaacatagatgcagatcaactattaggaacaggtcaaaattggagcactattagtcaacaagcattaatgcaaaatgaggccattgagcaagttagagctatctgccttagagcctgggaaaaaatccaagacccaggaactgcctgcccctcatttaatacagtaagacaaggttcaaaagagccctaccctgatttggtggcaaggctacaagatgttgctcaaaagtcaattgctgatgaaaatgcctgtaaggtcatagtggagttgatggcatacgaaaacgccaatcctgagtgtcaatcagccattaagccattaaaaggaaaggttcccgcaggatcagatgtaatctcaggtatgtaaaagcctgtgatggaactggaggagctagcataaagctatacttatggctcaagcaatagcgggagttgttttaggaggacaagttagaacatttggagggaaatgttataattgtggtcaaattggtcatttaaaaagaattgtccagtctcaagtaaacagaatataactattcaagctactacgacaacaggtaaaaagccacctgacttatgtccaacatgtaaaaaaggaaaacattgggctagtcaatgtcgttctaaatttgatagaaatgagcaaccattgtcgggaaacaagcaaaggggctagcctcaggccccacaacaaactggggcattcccaattcagccctttgttcctcaagggttttcagggacaacaacccccactgtcccaagtacctcagggaataagccagttaccacaatacaacaattgtcccccaccacaagcaacagtgcagcagtagatttatgtactatacaagcagtctgtctgcttccaggggaacccccacaaaaaatccccacaggggtatacggcccgctgcctgaggggactgtaggacttgtcttgggaagatcaagtctaaatccaaagggagttcaaattcatactggtgtggttgattcagactataaaggtgaaattcaattgattattagctcttcaattccttgcagtgccagtccaggagacaggatttctcaattattactcttgacttacattaaggttggaaatagtgagataaaaagaacaggaggatttggaagcacggatctgacaggaaaggctgcatattgggcaagtcatgtctcagagaacagaactgtgtgtaaggccgttattcaaggaaaacagtttgaaggattagtagacactggaccagatgtctctatcattgccttaaatcagtggccaaaaaattggcctaaacaaaaggttgttacggggcttgtcagcataggcacagcctcagaagtgtatcaaagtactaggattttacattgtttagggccagataatcaagaaagtacttcccatgctaaaaaacatttattatcttgttttgctgtaatgggagttccagaaaaaattaaaactgacaatggaccaggatattgtagtaaagctttccaaaaattcttacatcagtggaaaatttcacatacaacaggaattccctataattcccaaggacaggtcatagttgaaagaactaattgaacactcaaaactcaattagttaaacaaaaagaagggggagacagtaaggagtgtgctactcctcagaggcaacttaatctagcactctatactttaaattttttaaacatttatagaaatcagactactacttctgcagaacaacatcttactggtaaaaagaacagcccacatgaaggaaaactgatttggtggaaagataataaaaataagacatgggaaatagggaaggtgataacgtgggggagaggttttgcttgtgtttcacgaggagaaaatcagcttcctgtttggatgcccactagacatttgaagttctacaatgaacccatcggagatgaaaagaaaagcgcctccatggagatggaaacaccactcacatggatggataatcctattgaagtatatgttaatgatagtgtatgggtacatggccccacagatgatcgctgccctgccaaacctgaggaagaagggatgatgacaaatatttccactgggtatcattatcctcctatttgcctagggagagcactaggatgcttaatgcctgcagtccaaaattggttggtagaagtacctactgtcagtcccatcagtagattcacttatcacatggtaagtgggatgtcactcaggccacgggtaaataatttacaagactttccttatcaaagatcattaaaatttagacctaaagggcaaccttgccccgaggaaattcccaaaggatcaaaaaatacagaagttttagtttgggaagaatgtgtggccaatagttcagtaatattacaaaacaatgaattcagaactattatagattggacatctggaggtcaattctaccacaattgctcagggcaaactcagtcgtgacccagtgcacaagtgagtccagctgttgatagcgacttaacagaaagtttaaacatttctggtcatgaacatccaaaattatggaggcttactgtagcctcataccacattaggatttgatctggaaatcaaactttagaaacaagagatcataagccattttatactatcgatctaaattccagtctaacggttcctttacaaagtttcataaagcccccttatatgctagttgtaggaaatatagttattaaaccagactttcaaactataacctgtgaaaactgtagattgattacttacattgattcaacttttaattggcagcaccgtattctgctggtgagagcaagagaaggcgtgtggatccctgtgtccatggaccgaccatgggaggcctcgccatccatccatattttgactgaagtattaaaaggcattttaaatagatccaaaagattcatttttactttaattgcagtgattatgggattaattgcagtcacagctacggctgctgtggcaggagttgcgttgcactcttctgttcagtcagtaaactttgttaatgattggcaaaagaattccacaagattgtggaattcacaatctggtattgatcaaaaattggcaaatcaaattaatgatcttagacaaactgtcatttgggtgggagacagactcatgagcttagaacatcatttccagttacgatgtgactggaatatctcagatttttgtattacaccccaaatttataatgagtctgagcatcactgggacatggttagatgccatctacagggaggagaagataatctcactttagacatttccaaattaaaagaacaaattttcaaaacatcaaaagcccatttaaatttggtgccgggaactgaggcaatcgcaggagttgctgctggcctctcaaatcttaaccctgtcacttgggttaagaccattggaagtactactattataaatttcatattaatccttgtgtggctgttttgtctgttgttactctgcaggtgtacccaacagctccgaagagacagcgaccatccagaacgggccatgatgacgatggtggttttgtcgaaaagaaaagggggaaatgtagggaaaagaaagagagatcagattgctactgtgtctgtgtagaaagaagtagacataggagactccattttgttctgtactaagaaaaattcttcagccttgagatgctattaatctgtaaccctacccccaaccctgtgctccctgagacatgtgctgtgtcaactcagggttaaatggattaagggctgtgcaggatgtgctttgttaaacagatgcttgaaggcagcatgctccttaagggtcatcaccactccctaatctcaagtacccagggacacaaacactgtggaaggctgcagggacctctgcctaggaaagccaggtattgtccaaggtttctccccatgtgatagtctgaaatatggcctcgtgggaagggaaagacctgaccgtcccccagcccgacacccgtaaagggtctgtgatgaggaggattagtataagaggaaggaatgcctctttgcagttgagacaagaggaaggcatctgtctcctgcctgtccctgggcaatggaatgtctcagtataaaacccgattgtatgttccatctactgagataggggaaaacagccttagggctagaggtgggacatgcgggcaggaatactgctctttaaggcattgagatgtttatgtatatacatatctaaagcacagcacttaattctttaccttgtctatgatgcagagacctttgttcacgtgtttacctgctgaccttctctccactattatcctatgaccctgccacatccccctctccgagaaacacccaataatgatcaataaatactaagggaactcagaggctggtgggatcctccgtatgctgaacgctggtcccctgggcccccttatttctttctctatactttgtctctgtgtctttttcttttccaagtctctcgttccacctaacgagaaacacccacaggtgtggaagggcaacccaccccttcatgtaatgtccatttaaatccataataaatggtatgcccagcctggcacgggctattgatgagtcttttgagggctggcatacatgcaacccactcaccttacccttacctccttgccaacttccctgtattgccttattactcagtcagactacacccagtctcagaaaaacaaggaaaagtgaaggaaacattgtcgatgactgagtcaggggttaattggtctcttatcatttaaacatgaaggaaagaatgtgaaagaagaaaatgatagacaagtaaaattctctagatcaatcctggagataattgtgtaaaactttgccaagtatttacctagttacaagtgctaatcactttcacgtaaaaagccttaataaactctacacagcacattattttgaatccactaaaatctaaatctgaactgtgttagatctcttctttctaaaaagtttgatatacagacctgtattacatttaaagaacactgtgagaaattcaaaaatactgagacattgatgagctgggcacttggctcaggctcctatgagacttacgatttcaaatttgctccatcaggctaattaaagggagcctgaaaaaaaagcaaaatggactaaattgggaagtcttaggatatattttaagctgggttatttaaccatctcttgtttgaaagaaatctagtaataagaatgaaaattgtgtaatggatttttttttttgtaggcatcttgtttttattgaacagatagactctattgattttgatcataaaataaatttctataagggaaagactattttccctcactgacctctattctaaatcagagaagtagtcccagagaaaaataataatacgatggtaagtgagaatagcatctcctttcaaaaaaatataactcaagaagggcctacaactacctttctcctagatcataatgttacagtctaagaggtagggttttctaatgtatttccaccatatattacacaagtaaaatttaatttggagcaataggttctattctctggatgaggtaatcctaccattgatttattcagtaaatatttttataatgtctaataacaccgtgtacttgaggaaattaaataaattaggttcttgacagtctctatatagcaaacacacagtggaatgtcaaataaacaatatttattaaatatatacaatataaattcagtattattccaagactgtagggttggtggaagaagtacggagaaataaaagaagattgagttcttagattatgaaattaacaaacttgaatatcatgcagtattttttggaggcatcatgtacagattgaagaatcccatcaggtgtttagcaaaatgaatgaaaagtaaagagcataatataaaataaaaggtcaaatttaattatccatatatattatattaataaataaatggtatagaaatcacctattataacacaaagactctcagagtggacacagagtaaaatataagtaaatgtagcatatgagtcatttacaacaaagtgacttataaagccctttagaaattttaaaatatggttcctgaaattaaaaaataataataataccatggttggaagataaagtcaaggtaccatgataaaattaaaggaaaatgaaaatgctcaataaatgtccaggtcattgaattaaaacacacacacatacacacatacacacacacacacgaaagtaggtcaaattcaaaggtaccagacaacagatattctaataacaacatgggctgctaaaatacaaagaagtgctttcaaaattccaggagaaaataatttcaatttcaatttctggaatcaaatgtggtagaatgaagtattttggtgtctcataaaatctatctcctacgtacactttcttagaaaactactggtagatgtaatacagtaaagcaatggcttaaactaagaaagaggaagacatgttttccaaacataatagctccaactacaaagcctaaatatgtcctaggatgacaccagggcagcaaggctagagagaaaccagcacaaattggagaagggtggaagatttcaggaaagaggacttcaggaattgttaaaatagatgatatgataaaacattctgatacaattaaggatatacggaaaacaataagagaatcaacaacagtgataatggttaacgtatatcgaactaattgttaaaatagatgatataattaaacattccaatataattaaggatatatggaaaacaagagaaacaacagtgataatggctaacatacattggtagagagaattatgcaactaaaaacattatacaaggactcaattattaaatttagggaaaaatgctttataaaatggaaaaatgatttggcatacactagttgcgcctaccattaccaaaatacatatagtaataataagatgagtaatgatagatttaactaaaaatactgaggtcactgactttaggaagatggtatgaagaaaagaatggaatttgaaagagcaatgttttcatttattgtaataggaaattaatatataatgtccagaattggtaattcaaataaaagcaatgtaagaatattgtttctaaatgttaaaacaactaccagaagaaacagttaagagttaaagggattgccacacagagtatgactgtgtatcagactgggtttttgtaaaaattataaaaccgccagagataatttactttttaaaattattaaatgtacttggtttatttaaaatgtttagtaaagtaaaaggtatgcattacaaaataaagaaagaactaagtggtactttcaaagatctccattacttaaaacacttgctccagctgtttttactctatgacatacactgaagtgtgtttgctaattcctgaggtataaatagtcccattacagtttatttcaagctactaacatgacatcacagaatgtggagttgagaagagatgcaaagtaacacaccattattatagtaacttcatcatacagatacagtaaatgtgaataaccttaagagcacagataataccaaaatatagtaaaattattaggaaatgatgagttttgtgtatctattaactttatttttaatataatttatttgtttataaaatttagttttttaatggttgtatggaaagcatgtaaagttttcagaaatttaacaatcgtccctcagaagcctatatgagccagcttcagcttacagctaatattgagatgcccaccatattcctgtggagtgggatgggatattagctggctggctggctggctggatggatggataaatggatggatggatggatggatggatggatggatggatggatggatggatggatgattagtcaaaatgtaactaacagaaatgattaaccacccaataggcaattctcaggactgagtttcctcttctgtgattaataccttaaaattcaaagacaacctacccataatgatagtcgctctgtgtggtggctttagtcaagcgttgttcattgttgttttataaaaagcacaattggttattttctgacacttttggccacattttttttttttttttttttttgagacggagtctcgctctgtcgcctaggccggactgcggactgcagtggcgcaatctcggctcactgcaagctccgcttcccgggttcacgccattctcctgcctcagcctcccgagtagctgggactacaggcgcccgccaccgcgcccggctaattttttttttttgtatttttagtagagacggggtttcaccttgttagccaggatggtctcgatctcctgacctcatgatccacccgcctcggcctcccaaagtgctgggattacaggcgtgagccaccgcgcccggccggccacatttacataaagtaaaatttggatgtttcatcaagtagaatatcaacaaatctaaagaaattatcaataattatcagttaccataaatctgggcctagagtgaatatttacctgaattacctgatgaaactatgttagaattaagttcttcaagtaaattacaagcacttgtgggcagattttgtgtctggtttgtttttctaacttccttagcaccaatacaatgtttaaaactagattggaatataccactcaatattacagttatttttatgtttttgtcttctgataactatgggatctacttgagggtgaaattttcatcttgtcaaatctatacaccaatgcctagtttatattaacctctcactaaatattagttcggttagattgaagagtgtccaatacatatatattgaattaaattaattagactagatcagaatttaatttgatgtcatcttagcataatcctaaaaaagctatcaaacaggctaagttttgtgtcattaggtagtataatgtatacaagggtggattcaaattccagctcatttcttatgagcttccagatcttcatcaagtatgtaatctctataaacttcattttccccacgctaacaagtagataatatggttgttatgattaaatccatacaaagtacttagcataatacctggcacacagtaagctcttaataaatgtttgctgttatattgctatgctttatgctctagataaatctgaaatgtgcttataatatatgatttgcctgaagggtgacctaggtctttaaaacagtgacacatttgcaattgaccatcacagggcttctcacaaaattgaactttataatgccatcggattgtcatagtttcccttctagaaagggaacctatgattcattaagctaaatcaagactaagtatcaagtgactattgccttttgatttgttttcttgccttaggtttgccttgatgatctggcatgttaatagaagccacgtattggtctctgtgttatctcattggatttcctgccgaccatggagattgacgggttttattagccctcacaggaaaactgattctcaaagtcaaaaatctcaagcatagaatacaagatatggacccatcgatccccactacaaaaagcctttcctagtacagactactgcctctcaaagattgcgtttctcatctcacttttcttaccaagatttctcccttgaaaaatccagggaaatcaattatgtgtgttcattcctgatcctcagttgttaacataaagttgtatactgaggcaaatttaaaacatagctgaaaatcctttgacattgatacggtttgactctgtgtccccaaacaaatctcacctcgaattgtaattcccataatcccacatgtcaagggcgggaccaagtggaggtaattggatcatgagggtggtttctcccatgctgttcttgtgatagtgagtgagttctcacaagatctgatggttttatgggcatctggcatttcccctgcttgcactcactgactctgtcctgccactctgtgaagaaggtgccttgcttccccttcaccttctgctatgattgtaagtttcctgaggcctccccagccatgctgaactgtgagtcaattataccgttttcctttataaattactcacccccacctaccaccttttagataatgctgtgggacataaagacttagaattctctcttcaaagggcttggatatggcttccagggttcatgtttctctcctccagttctgtctttcatggtgagccatgtatagagagcgcacaactagaggccctgtgggccaatgcaaagctgtttaccagaggtacagtggtagactgagcttggacatatccacagaggtacccaaaatgtgtacacacaaggcctgtcatggtgtgagaccacattgggggaccagctctccccatgcccttatattctggtactggactttgagggcccaagaattccagctctaaacttgaatttcattaggaagctacatgtgtcaaagtgggaaaacaaagcatacttaacagtttgttaacatgatttataacttttaaatatttaaacatgtactatataggtttttattattattcttgccctaggccttaagaatgttaagtgtaagacaattaaatactttattagatataagaatgcaagcacagatactcagaaacttaaatataagtctcaaactagtccttacttttaaaaaataatgatatattccatttaacatcatatttagagtggatccattatggcatcatgacatctttgctggttcagttacaattgaacaaagtattgggcctgacatcaacactatttctcaaaatgctaaagatataaaagtgtgggacagatatgtcttatgcttattttgtaacataactattcattgcatatatccaaacatcactacatactccataagatttagtcttatttacaattatttagttgtttacctaatatttgctatgtaatacacacacacaggcacacacctacacacacatatgtgcacacatacacacatgtgcacacatatatatttcaaatacaaaccataagaagcagccaggatgaatccagaggacattatgttaagcaaaataagctaagaacagaaagttaaatagtgcatgttctcaccgtatgtggatgctaaaaaatagaagatctcatggaaggaaaaagtagaacagaggatactagaggctggagaggtgggtgagagatggataaggagagatttgtcaaaaaatacaaaattacagctagacaggagaaataagttctagtgttctatagcactgtgagatgactatagttgacaataatatatagcttcaaattgctagaaggagtatattgaatgttcccatcacaaagaaatgataaatgtttgacatgatgcatatgctaattaatctcttaactattcattgtatgtatccgaacatcactacataccccataaatatgtacaattattatatgtcaattaaaaaaataaaataattaagaaaaaattgcaaaagattaaataactgtaacagtagatttgtgctctcaaatattaaagcattctataaatttacatagaatgggggtagatatataaaaattaaaaataattgaaatggaatctgggtgatagattgacaatactactcttaatattaagaatagtatagctgaaccaaagtttaacatgttcaaacctttacataaatgtatcctctctaaacgatttgaccctgcttatggataattaaggttgtaatattttggacataaacgcctgtttacttataccagaatatatcagcaattataattaaaatgatcttacatattatttgtcatatcaggactcatactatttttattatgctgaaggtatatggtgaattttttattttttttttttgagatggaatctcgctttgttgccaggctggggtgcaatggcgcgatcttggctcactgcaacctctgcctcccaggttcaagcaattctccttcctcagcctcccaagtagctgggattacaggcacatgccatcacactcagctaatttttgtatttttagtagagatgaggtttcaccatgttggccaggctagtctcaaactcctgaccttgtgatccacccgccttggcctcccaaagtgctgggattacaggtgtgagccactgcgcctggccgcttttttatcactatgatttactcatctacctttttacaaaaagaaaatgagatctcagtaacaactggcagcactatgttcctctgatgtatatgaaatatttaagttctaggcttgctcaggtataagcagagtattcataatgtcatcgtttacataaagtataaatgcacaacaccaggaatacttcaaagacaaaaagcagaaattatgctttaatgtattattacaggaaatgttggtatcttgtgcatttgtgatttggagcattgaatgtttatgacatgtttcacttgccaattttctgtctttatttggtagcagccatttattcttgaatcttattaatacatttacattcagtgtattgtttatttcatttcataaactatgacacctgagcgaaaatgactgggtttcttaatctgtacaaatcagggaggacttacaggacatggaagctgatttgtacagtatccaaagtatccattagcaagcaagctcatagggttgttgtaaggattaaaagagaaacccttatagtcaatgctacatattattattattattatttttactttttttttttttagacagagtcttgctcagtcaccaggctggagtgcagtggcatgctctcagctcactgcaacctctgcctcccgggttcaagcgattctcccgcctcagcctcccgagtagctgggactacaggcgagagccaccatgcccagctaatttttgtatttttagtagagatggggtttcaccatgttggccaggatggtctcgatctcttgacctcgtgatccccccgccttggcctcccaaagtgctgggattacaggcatgagccaccgcaccctgtcttatctcttttttataaacaaatatgagatctttaaacgcatactgtctctagattcccttggttgtgctgtttgtatatttggtgtcccatgtgaagtgcttagaaccagacctgatactaagcaagagcttaatgggtgatattattattactgctgttattatggttctgaaattgtagttctctgggtcagtggctaaaagtggttggaggaagtcttgttaaagtataacaaaatttactatctttcctgtttgcaggaaatctggaaagtatttgccactgattaggaaagctttttttagtataatacatccatcactgaatgggaaagcaggaaggggatctgccaatgatatgtaagaaaatactgtgggttaaaaaattatcttggtgtgaaatacagagttttatgcgttaacttttctctattaattcaggaaattgttttctggaaataaataacatttacagacaattgaaagtattgatagaaccacacagttgtttcaagctatgtatgaccatctattaacattccgggtgataaatttggtcataatttttatttgtcattgaggatgcaccatccaatgagattaccatttaatgattaaatatccaatatgacttattttatgaaatgatatagcatttcctatttagtaaggtaacacggaaacttatctagtataagacaaaaaccaggcccaatatataaaataatacataatacttgctgttaaaagctgagagaatctttcagtactggaaggcattgcctctctaaatttaagccgagaaattgttaccatagcaactcgcctcttatgtagttgtattattttgttcccttcataaaaattgctatgtattatcactctgtaaatagagacgatatgtttaaatgcatataatatctgcttttccttagttgtggaaaagtttataattcaggtgagtgaccatagcagagaatgtcacccaggaacaggaacatagagtgggttcttgacatttgtctggggtacatctgacaacctttacaaattccaaatttgagaatactactgtggcacaccatttttctggaatttcaatgtgcaccaagaggggaggaacataaagctacatgctcatggagatgttgggttcctcattggttgcccttcctgtaccagccagcatcctattctggtggaccagccttgcacagagtttgtcaatcacatttgtatcccagcaacattacacgttacttcgtgacataaacctgtggggttgctcaagaagagaactgaatctgaaaatgcctgagtgacgactagatatggaatttggcagggtactgtttagaatgggatctaatctctgttctgcagatttaaagtgcattaaggttaaagaatttgactaagtcacagagtgtctcagttttttcgtcttcatggtgtagacgttagctgaatggactgtggagcctgactcctagcagtggcatttactagctatgtcaacttggataagatacttggcatttctgtgcctctatttccacctttaaaatgggaattatggggaaggaagtgagagggagagatatgttaaagcagcgatcctcaacctttttggcaccagggactggttttgtggaagacaaattttccttggatggggatggggatggttttgggatgaaactgtttcacttcaactcatcaggcgttagttagattctcataaagagaacataacctggacccctcctatgtgcagttcacaatagggttcacactcccacaagaatctaaagctgcagctgatctgacaggaggtagagctcaggtgggaatgcgggcaatggggagcagctgtgaacatagatgaagcttcactcactcgcccgccccctgctcacctcctgctgtgtggccggttcctaataggccatagacagggactggtccatggccaggaggttggggatccctgtgttaaaggatacaaaattatagctagataggggaaatcagtgctagggttctataccacagtagggtgtctacagttaacaataatatgtgtttcaaatagctagaaggaggatattaaatgctcccaacacagagaaatgatggctgttggagatgctggatatcctaatttccccaatctgatctctatacattgtatgtaataaaacattactatgtaccccatgaatatgtacaattattatttgtcaacttaaaaaatgtcaaaaaccatactaaataaataaaatgggaattataattttaccttatatggctgtagtgcgaaaaccacgagtgaatgcataatgtactcaataaatgttagccatgatcataatgataaattttactctgaccttgaaaaattcccaaagctatggtgacatttttatgaacaggtagcaggggagtgtttgcatgtgatcaagggtgagtataaaagtatgtctttggtatatattcattcatttggtcaattgacattcaagaagtatttattgagtgttaattatctgttaggcactgagaatacaacaggaaaccaggtatatttagtgcctgtcaccagagagattatagtttagaaaggtatatcgaaaaataaatacaagattataaatagtatggttaagttagggaaggtacagggtgctccaggaggacaacgatataaacactaatgtgttttgaaataagatttataactttgctactcatcgtgtgtatcatggaccaagagtacagacatcacttaggagcttgtaaggaatgcagaatctcaggctacgccctgcaccactgaaatagaatctgctttttagcaagatttttaggtgatgtatactgtatgcaattaaagtttgagaagcacagattttaaacagaatgagcaaaaccataagacaattgaagcatttgtaaaattacctcagggctaattaagaaaaaatatttcttgagtacctactatgtgcaaggccttgatgcaaggtggatagagtctcagctgggcaagtgtttgtggattctccatggctcaaggcacatataacagccctaaggaaaataatccatcctgtgtggttcttagctcctgggcctggctcactgaccacacacagctatttgaaaagtctggttttcagagaagactgtattatgtaaaaattaagtcctgttttaataaacttgagacactatcaaaccctgaattatattcaaccttcatggaacgggagcatataatataacacaaggaagaggcttatataatgaaatgtatttaaagtaattggtctgtggaaagttgcatttggaaaccacaaatttagaaggaagaaagtaatacagaaagatatatcttattacttccaaatgcccctatgacttggatgttattgtttcaaatttaggaatgaggatgaggaaactgggacatagagagtttggaaacctgccttgggttacacgagttgggccaggatttgaagtgttgctctgtgagtggctggtttcaggagggaagttcagaatagctgaagtgcatgatgtggatggatgaaggttgttagaggagggaagtggggaactgatgaggaatgaggttggggaactgatgaggaatgaggttggggaactgatgaggaatgaggttggaaaggaaggatgtagaagtcagattccaaagggccttgcaagtctcataaaggagcagcttgaatatgacttaaatggtagccatcctatccaaacttcaaattcctgctttaaagtatttctggagctccttcatcttgcttgatgtagtgaagaatatagtcctggctcagctgccgtgacttaaacatgacaaactgtattccagtagaaactgattttggttgaggaaattattttaccctagagtaaaataatcaggaaaaaaaaacacttccttatatgaacttgtatcttcctgacaaacagcattcattgtctatagttctttttgctgagatacatttattttattttaatctttgggttagataggacacaatggactgtcctattttgtggtaagggtgcctcaccaataatctgttataaaaaataaagtattgcactttgtgaatgtttaatataatttaaaagtaaactcagattcaaaatgttccttatatataaccattatattagaattcttcttttttgagtggaagaggaagaagagttatttttagtatacatactattgtatatggaggtgtttcatgaatgacaatgacatttctcaagtatatcaaggcaaatgatcaattgacaaaaagtgtggtgctctgggagggtggggggactcattaaagaaggaatgagctagtggctacaggaggctacattcttttttttttttttttgacagagtctcctctttcacccaggctggagtgcagtggcgctatctcagtgcagaggctacattcttaatcctggccaatcatcttatactcaaagagccaggaaaaaagagtgtgtgtattagggttctccaaagaaacagtaccaataggagacagatagatagatagacaacataatttactaagggaactgactcacgggattatggaggttcttctgaaataaaatggaagttttgtctttgtgtctgcttgagtacctgctcaggaaccctgaacttagttctaggaatgcaacaaattctaatttttggattgctaactcagggttaaaaagaatcctgtacattcccactttattatcaaccaccttaaatgtggttaattatgtgaaattatggttaaggtgaggggtaaatatggagaaaaagaagggggcttccctgtattcactagacttttatttcgttccagggcttatgacagagcccaagagagtcagagaagctttctacaaattcagctgtcgcattcattttcttacacactagagttgccacttaaaaatactaaaataaaataaaaaattaatgttgaccatctaacaggaatacttgactcagctactaagttacaaatttgcttcatttttggaagacatctagcatctgagaattggacttttcccagaagttcacttggtaacctcaggtaagtcctggttcatcctggagaggatccgaggggaaagcctgatgggacccacggccgccctgagaagaaaggggtgctgtggggtgcgggaggaggaggagctgggaagcaggagcgcccgggactggatctagctggaaagggggcagatgctctcccggaatcagggtaggtaccctctaggaatgggacgttccgagaggggggtgtgtctggaacattggctaggggtccttagaggtgatttctgggaagggaaggtctggggcagggctgtgaggagtcaggaaagaaactgtggagtccgttcctcacccacttcctgagccctaggttccgaggcccccaggtcagggggttcagtggcgcaggagggtccagggcaggagttggtgagtcacctctcaggtccacctgtaaaggaactctgactcagagcatgagggtagcccaagaagcttcgacttcacccagagaaagtctgcccgccgttctgcccctggagcaggaggcaccgcccctctctcacccttagagccggcggccccgcccctttcctcccactggagcctgcggccccgcccccgcccgctcccggagtcagcggccccgcccctctccccagagtgggcggggccgcaattgcctgctcagctttccttgtgacgcctcatatccccctgggtgcgctgttgcctggctgcgcttcctttttctgtcatctttcgcatcgaccaatgggcttggagcatggaggccacgccccccctctgccctagttggccctggttacaccttctctggtcagtctcacagctgcgcggtggcagacaggacttgttccacagtggtaactgggatagagctgatgtggccccaaccccacctcccttcccgccctgccatgtcggaagaaacccgacgagcaaattggcagcagcaaagaaaaaggtacaagcgcctggtggcagcccaacgacccagccccaggtgccgtctgatggcaggaccacggccagagctcatgccactcccgaggctcactgggttgggcccccagctgcctctgggctccctctaccaaagtcttgtcagtgagcccctcccctcaacagcccagaccctgcctggagtgagatttgcttatttaccatgaaacagatcttgggaaactgaacttgacacttgaatcttcctcatatctcaacctaggtgactttgagtgccacagggtaatatggggcatctttctgaagcatcagtttcccttgattctcttgagagagaaaaaacgttcatggacttagggatgacagccccatagatttctaagagtataccaaaattcactctgaaaagaggcttgggttgtcctctttctgttcaattcccagatgtaacagaaaggctgccttctgccatgaggactcattgatgtaagagtttgagaggggctgctgcacttcctacactaacagacatgtgatgatgtgtgactctaaaccacacagtacccagttcctgcctacttagtgtctgtttttctacctctgcctctggtattgggccctggcagctgctgatttgtggcaaaaccccagatcttggagtcagaagacagagttcaagttcaattattgccttttttaagccgtggtatcaatccctctcagtcattaagtcattaagacaacaccttgtacagttgtttgtggcaataaatcagatggcataaaagaaagttctgtaaaaactgtaaaggcagatgtgattgtagggacttctcatgagaattcctgctcttcttttccacagttgagagactatcagtggaggaacagccctggtgttcctacaggagtgaaaaagaaaattaaaaattgcagtaaccccgagacaaccacttctggtggttgccactcacctggagatgtgagtcttggctggccaggctcctggggacagggggcccaagggcagtagagggtacttgttaagattgtggaagaactgttgggtcctggttaagaattctgggtttgaatcctatctctccctctgctagggatatgatgtagggcaaattgcttgagctctttgggcctctcttttcacatctgtaaaataagggtggtattgtttgacttacacttgtgaagcttaaatgagattagttattatttttatgttaatgccaagtacagggcctgccataaacacccaggacacccaggaaatggtagttgctgtttcattttcctcatccccagtctcaagggaaagccaggctaatgggaacagccacttgccatcaggctgtctcttttggagtgaccgaaagggcccaagggtgcgatgaggagagccccaagcactaagattgggagaagatctaacttttgagctcatctttgcctccagcgtgctgggtgaccacagaaaaatcacttcttccccttggcctctttaactcctctgtaagatgacactggataagatcagtgtctttcagacttgttttttagctggagcctcctatgttgaagtgaacccttactcaaaagtctggttttttaaatggaggtggaggtctagtgctctaccagatttatccccacatcctgggcctgaggagagcggtccaatgagagtattcagagcagcattgtcaggtgactccaccctgtgtgactgcaccactcaggggacttttccatctatttgtttctgcccctggcaaggcagcaggcagccatttggaaggcacagcccctggtcttgatctcctccgctcttcttcaacatttcgcttccctgaagccacctcttcctcctcccctgaatctcttgcctctctctaagcctcttctgtctttgtccacctgcccttgttctacccttttggcctcctgtggattctccttcctcccgctgccaagcatagcctgacacccacagtgccaactcagagagggaagagcctcctcacccaagcctctggagtccagaagacaggagctccaggagggccccaccctcacaccctacctttccagatgctctctccagctgtgcatgccgctgaggctcctctggtttgggggatactttgcctctggcttattttatgttgctgccatttcccttctgactgtttatgtctgcttcttcacctgtttgattgattgggtttttttccttcacccacatcttttattatcttggagaaagtgagacatatcttaaaggttagaggtaatttgggaataactttaagagcaggcatatggaatttggggctttttttcttagagacaaagtctcactctctcgcccaggctggagtgtagtggtgtgatctcagctcactgcaacatccacttcacaagttcaagcaattctcctgtctcagcctgctgagtagctgggattacaggcgcccgccaccacacctggctaatttttgtatttttagtagagacagggtttcaccattttggccagtctgatcttgaactcctgagctcaagcggtccacctgcctcagcttcccaaagtgttaacattacaggcatgagccaccatacccagcctgagatctttttaaaattatttaagtttttatttctaaagcaaagtaacttgacagtagagatctttattgaccgagttgtacattgagcctagccctagcccttttaaggggcactgtgtggaacagcctggggtccccagacctaaacttctcactcttcaccatccagttttcaagccggtgtgaagcccctgatgctaaccagcagttatgacaggccatggaggagcgggcacagctggaagcacacctggggcagtgaggctttgcagagggagggatgtggaaggaagatgaccccaggtggctaggagcaggagaggaccagtgacagtccttcctaacttctgcacccattcttgcaggtaatggaggcatgtagacaaatacaactggagagagatacatttgctgagattcttaaaggagagagagccacatggcagcagaggatgaatcagatgtcggagcaggtgagacctgacacttcagcccccactttagatctttctgggcatctgtaaaatgggaggggtggtcatgagtctgggctttgtggaggagagggcagagagggagatggtagcctgtccagccagcagcccccctctccagggccctttccccctgtgctttgtgcagatgcacacactgagggaggagaaggagtgtattatgaatcggttacaggagctggagacaagcttggtggaattgagaaaacagatgagtaagctgaggctggggtgacctgggaggagggctaacatcagagggccatggggggtgggttagaatgtcctagggaggtgggtggatggaaggactttgaggcagaggaaaagaggtatgtgccaggagatgacaagtctggttatctccatgagcctcagtttcccagtcagcaaagagggaggagtgcctattgtcagccacccacacatgtctgtatctgtaagtggcttagaagattggctaccatccaggtgtggggaatcattagcagggaggccaagtttgtggagcctgagaggagctgtggaccaagaggaagattttttttaagattccagaggcccttattgtctgcttttttttcctcagctgaactcccagccctggcacccccagcaaggccctccgaggtggagcagcagctacaagaggaggctgagcacctgagggaggagctggagagtctggcaggacagctccaagcccaggtacaggacaatgagggcttgagttgcctgaaccgggagcaggaggagaggctgctggagctggagcgggcagctgagctctggcggaagcaagtggaggcacagagacaaatcctgtagaccatggagaccacaccgctgtcagccacgtgctctcccagacctgtgaggtcaaggaacagctggccgagctgcagagtggcttcataaagctggtgcacggccccacctggggagccagccctcctccctagccctttgggcctttgttttcccacctgtcaaatggggccgtgtagccctcacgtgaaatggcacttctgagggcacctgtgagccagagccctgctccaatggctgtggggaggtggggatgatttttctaacctgacttcacccttcctggtgccatgggaggcagacaccaagttctgggctctccagctgcaatgaagttagcatcttcttcgcagaggtgccaaggattaaatgagataatacgtggagagaattaggcatgtcggacacttagcagatgatggctggctcctgcttttccaccattctgtggcctacagtttaagtggtgggaagaagagtgtgagatttcatgcagggaaggaggcatggggctctaggcagtctctcaggcctggagcaaggggccacgggcctgggcaggagacacagccctgcagtgccctaggtaccctattcataggcccagaatttgaaagcaggccaccacctgcaggtcttcctgcaggtagagatgaagagccaagaggctcagagtctgcagccgcagcaagaccagtccctgggtcccctgcatcagtacatggccacttgtcagcagctgagctctgagatggaggcgctgcacaggcagttactgctgcagacccagctcatggaccagctgcagcagcaggaagcttagggcaaagcgatggccgagatggcccaccaagagttgcgggggacccaggtgtgggagttgctgagggcgggtcccaagggggacgacctggcagcctctgtgccttcaactctctttccccgccccttaggagcacctggaagctgccagccagagaaccagcagctacaggcccagctgagcctcatggctctccctgaggaaggtacgggagatcactcagaggaagaggagggagcccaggaggaaggggggactgttagcagataggagtgaggagtttagaacagctggtcactatgccgaccgggtttctgcgttaagttcggcatcaaaacggtgacctgggagtagaggggccaccaggttgcctaaggatgggtgaactggcccaagtcagaaatgaagcaggtcagaactcccctgccgggcagtagtggaactgagcttgggcaacatagtgcgactttggttctcaaaaaaaaaataaaaataaattacagctgctcattcccctctggagagggactggcccagggttatacagtgacggttgaggcagaggtgggcccaccctacttcccttgttgggtcgcgtgaggacccctctagctctgtgccctaggaggtagactggacggagggtgggggagaaggaggggcgggggggggaggaggaggaggatgaggatgaggaggagaaggagaaggagaagaagaagaagaagaaggaggagaaggagaaggaggaggaggcgtctcggcccatgaagagcatcctgcaggacctggaaagccaggagtccatggttagcctactccccctgccccacctttgccccctccctctgtggtccctcccagacccgcttatgcttttggtttcctgctttcttatttctctggatcctcacccctttcctgggagccagtggtcagacagataccatttgacctgtgaccaacaggtgcacactctgaggccccaagcgaagggctcctctccacctccctgccccgttggtcctgtatatcccccaagaagaatgcacacctcttgcctgcaggtggcatttttaacatcagctgtagccagtgcagatggggagcaggctcggctccgtgggcagctgaaggagcaaaggctgcgctgccggtgcctggctcacctgctggcctgggcccagaagcagccagaggcagcagccccagccccagggactgggatggattctgtgtgtggggggacccaccgggccctgcagggtgccatggagaaactgcaggtgagtgagtctcttctggcatgggccaagaagggtgtgagcgaggcagttcactgccgagatgtgaccccattcttttggctccagagctgctttatgcagctgatgcaggaaaaggtggacctgaaagagcgggtggaggagctggaacatcgctgcatccagctctctggagagacagacaccatcggtgaggcggaggccagggcacggcagggggagctgcccagtgggtgaagggaacccagcgtctgagccctgtcctctcgcaggagtctacactgccctctctcagccagggggcagcgctgaaggagcagcaccgagaggaggaggagcacatccacaggctagcccaggacaaggaggagatgaaggcagggcgtggagcttctctgcccggcggggggctgcggggagggtgcagcttcaggcatggcagctgaacaccctctcctccaggtgaagctgctggagttgcaggagctggtgttgcggcttgtgggcgacaggactgagggccatggcagattcctggcagctgcccagagccctgctcatgagccagctccaggggccccagccccccagagctcagggctgccgacaagcagggtgatgagtagtgccctcaggcggtttgggcaggcaagagcaagggaggctggcagtgtgctcagagccctcctccctctctccaaagatctttgccaggtgaccctcaccagcagcgtggagcctgcacaaggagaggccggggagggttctcccctcgacaaccccagtgcacagcagatcatgcagctgtttggtgagatgcagaaccctcaggagcgcccaggcttgggcagcatcccctgcattctgttttcccaccaggctgacaaaaaccaccaggtgaagatcaccctcatctgaaagccagttgccttcagcaaagccaggagaaggggggtgggaggctccgcccccccatgtccctcccacccctttgcagtcacccctttacccttaaagtaaatggatttagccatactgcttggcctggcgtatcctgtttccctcactgggtcctggggtttgtgccactgaatgggggccccagaatgtctgagcatgtcgagctgggctgctggggaccttccaggcctgttacctgcatgctgcctggtgacacctgggggattccacaggtggaatggcacccatgggggacagtccggccctaatggccaacaggctcagaagcctgatctctcggtggctgggaaggcagggtgccagcacccaagggcactgactttcatccagcccaggcaacttcagtcccatccccctgtctgcctcacctgcctgtgcctggtagcctgttctgtgccttccgtccagcccaggcaactgcagtcccattcccctgtctacctcacctgcctgtgcctggtggcctgttgcatccctccctccagagtgcaggtgccccacaggctccctctaggctgagctcatggccctgctcctagtggccagaggtggcttccaggatgagccagctaagctccagggtctttccgggaaaagagttccttggaaagcatgtgaacttttcaccgcttccgacaaccatgaaagctctgagccaggtttagatgccgtaggattcaagggggcagcaaggggtccagagctgcagacagctgagggtgaccattggggtctgctcaggcaagatcctggagtaggtgaccacgtccaaggcaaactgtgactaaaaggaagtgctgggttggccagaatagaggaggctgagtgctgagaatccccaggggatctcggagggggcgtggaaagggccataatgggagggcagaggtgagaacagggaatgatgatgtcacagtgctgagcagcggggctggggacggagtaagtggaggtggagggagtagcctgtttaaacctggagctcatccctatgaacatgaactactggcaaaaaaaaatctttttaaaagaaaaacttaataaacttaggggtcagtaggcccttgataggggagaaacaagcctttaaagtgagcgaaacccaggattgagggtacgaggtctgtgctgaatctcctggattcaggattatatcccctgagggcccagccggaaggctggaacagacctgggcacctggaaagctgacatgggaaacaggtagcaggtgagacaaagtgggtccttgatgccaggaggagaagtgagtgctgggccttgcggccttgggtccatcctaggaagtgctggaggttcacacaagagccctgcctggctggggtttctgggagccagaggaggaaagttaggttgggagggagcagagtgggaagcacagctactagcagcctagagacttggagggagccagcagtctcggcttttagccaggaagggacttaggaagtggatagtttcctgggtgggtcatggtttggagaagtctagagactcgggatggtcgctgacctccctaagggatggggagggtgatctcttcacagaaattcatcagcagccctgaggtcagcgatccccatcccatgtcctgacaggtgcctcctgcagcccctccaccgccacttgccaggttctgaccctgcaagcacatgtgtaaacacacacatatgttcctgctttcctccggcagcaccttgcagggttctgagctctttattcccactcctccattttgctccctttcctgccataatttctctgcccgtgaagcctgctcttcttcagcagataggaggaacatgagctaatagggatgtgctgggcccaggctgcaggatcagtccccctgcagtcctgccctggggagtggggctgacagaaggtctcatcgggagatggaagcgcctcctcagcggtgctgtcagtggacatgtggagggtgacggttcacaggtcctctctgtccttcctactcctggcctcctggagggcaaagaacgagcctaacccctcactagaatccctggttctccagagggtgtggcatgtttgtggaaggaataaataaaggaatggccgagagtcctgcagtaggatgccacgggtgggggcacaggtgggttccagtaggaaaacggccagctgtgtcctggtctcagggcctccttcctttgatcagctctcatgcacatgctttcctttccccggttcctcttggcaagtgctgttgtgtcctgggcagcctcctgagtgaaggtgaggaatctccctcccctgagctcatccacatctaccagaaatttgacttcaaggcattctccttccaggcacccagccacgtggtgacagccaccttcccctacaccaccatgctgtccatctgggtggctgcctgccatatccattctgccttggacacctacatcaaggtgatgcacaggcctggagtttgtgtgttggggacagccaggtcccttgggtggagctgagtaggattgcccagagtgggaggaagaggtgatttggggagagcagcactctggggccctcatggaacaggtacctgtggagccaggaagatgggccgaggtgttggcatctctttcagatgcccaagaccttgtgggagccagagcatctcccaagagcatggagagcttgttcatgaacctggtctggttggtttggctctggctttgaccaaagacatgcttagtgctaatcccacactcctggctcagatggaaggacagtccacttttctctcccactgctagaagcctgcaaagcaaggacctgaggctccccgtggctgggcaggccccaggtaatcacgtgttgcccttggccctgcctctgctatgcacctgctccctgagcccagggctggggcagcaatggcaggcccttctcctttacttcctaacctggtcactggccatggtggcagcacacccttcctggaggaaggagagccagccaccaggttgtctgacagaggtctgtgtgtctacagagatttttttaaaacttgcccttttacgcatccctcctcctctaaatgttttgtaaacctggaaaccaggaaaatgacccattggggcttggaagtgactgttgattcattcatttaacttgtttattttctgtgcgccgggtgctataatgggcacaatgtgaatgaaactttggtgcatgaaacaggcatttacaatgaggtggtgaagacaggtaatcaatgtcagacaaaaatgggacatgtgctagagaaggagagggtgagaaaagtcagggaaccgacttaaacagaatgatcagggacaacctctcaggggagatcacctcaaggcagagtcctagaggagcctttggagaagaggtaagaacattctaggcagagctttggtctaaatgcagcaggaagtcactgcagtgttccaaccaggaaaataacacagttggagcagcgtgtgtgcaaggtgggctgtcccattcccaggcaggaaggggctggaccacagaactggggtgaggtagaggtgcttaggaggctgtcatgaatccctgtgtgagtggcagcggcttgggcaggcccagtggctgtggagacgcagacaagggcggagatttacaggcacttttggaacagaactcacagacttcaggtggattggctgttgtggggagaggcagtgagggagtcacagcgggctccacttctctctggcctgggcaggtgggcaagcatgtagtgatgcttttcactgatgtgtgggggaactgagggaggccctggttttggggggaagccaggttattgggctatctcaggggagctgcctgagagacatccaagttaggggtgtggagtgggcaatgggatgtgtggtctggagttcagaaagggctgggctggtggatatgtttggggacatcagcctgctggcagtatttgaccagctgccctgtgcctcctgcctcggtggggccaggtaggccatggacagcctggggcagcaagggctgggcagagggcatggtcagtgtggctggggtcagggaacaggacaggagagtctgtgggagtgggagcttggaacacttggaggatccttgcaactttgttcaccagagcaggctgggaaaagggacagggtgatgggaatggaaatggaagctctcccaaagtgctgggattacaggcgtgaatcaccgtgcctggccttccctctgcctttttcccactgccccatcagggcagaaggcagctgcagtgaggcagtgagcgccctgggactgggtggctgcattcttcatgactgtgctgtgtgtgctgagctgccttttcctggaggagaaggcggagtggacctggctaacctgggctcccttttcctggccataggaactgacatgatgagtgacacgagttctggaagcttggaggtgagccctggtagccgggagacttcatttgctaccgtgtcacctggggagagcggccgcggctgggaggatggtgacacctgcagtgagtgcagctgcagagagtcaggtgccagcggctcctcttttgaggagctggacctggagggtgaggggcccttggaggaaccacggctggaccctgagactgagcccctgggggctaccaagtggccctgagagcccagtaccctgagaagggcaaggagtaacccatgaccagccccctcctgcggggcagggctgcggaaccgagcagactctccagccatcttcctccttcttctgggggcgaggggttcccaggggacgtaactccccctgctctaggcctcttgtgaagccttctcctcactgtcctttaggctcccagggccaaagcagccaaagactgtatcctgcaccagccctgtgggccgacactcctgttgtatctctttttcagactgtcactggagcttccaggacccagaataaagccaatgacttacttgtttcacctggatttgggctgcgtatttgtttgacagtttcacctttgtggggacccctgtatagaccggccaggagtaggaaggagcctcccctccccaggacgaggaaaggagggaccatgccaaatactggggtcggggaggaggggtggtggagatcctccaagtcctgctctgtgacccccagcggccagccgccctccactgcagcactttttcacagaggtggttatatctctaggatatgttccttaaagtgggattgccaggtctaagggtgtatgtgtggccatgaacagggttaagaactctcgccaagctcccctcagtggaagtggttctcatgtatcctcccagcactgagacatgagagctgcaatgctctcgttcctagctttgtattatagaaattttaaattttcatacatagagagaagttgaaaaaaagcaccatgagcacccatgtaccctgcacctagatttaatgattatcagttttcataagccttcttcttttctccctccctttctattatttgagtcatttgtaagtcgaagacatcatgtcattttatctctaagtacttcaacatgcctcctttaaaattaagaatattctgttctagccgcaatatcattattacacttagaaaaagctaacaattccatagaattacctagtattcaggctgaaattcagacttcctgtttgtctcagctgtctttcatagctttggattttgttttgtttttaaatcagaaggaactgctttttagctttattttcctctctctcccacccaaatcactgtctcttactgcaagaaaaagtctgaccagttttaagaatgatgtcttagcgttttatattccttatctcataggattcactttggtatcattttacacattgggggactgccttgtcatggatagacatttcaaataatttttttctttgtgactggaaaaggttgactgggagatgttgttagacatcaaactaacagaatttcagggaccacaggtcaggaattttttaatggaattttctcctctaccctccgctccctgggcattctggttctctgttacctatattttgtctccaggttcccaggtatcttctcgtcagtccacaagcaacgtcagacaagtgtttcttcacccaaagacccccaccctgcagggctgcccaggcccatctctcctgacagcctggagatcatcagtgagcttcagcagtgggcagatgtggctgctgcctgggaatcccatcagagttccccaagtaccaatgctgccctgcctggcccccggcccaccttgtggactgcactgctgttcccgggacagctctcagagctgagcctggactcggtggtcattgcctccatagttccctctgggtgactggcagttctgtggtcataggcacccagtgctggactgaaggggccacaagtggaagttgaccataccatcttctcccaggagtcagcctgctggtggtccagcaagggccatctgccagcccctgtgcagctgcatgaatacaggtgtccagtctctggagggtttgccaagccacctgtctccttacatcataacctcaccaccccttcacctcctaagctggggacaacactctgtttatgggcagtgccccctcttactgccagctacccaatttgctggcaggtgcccacctggtgtttccagtgactactgaccctctgatgccagccagcaggccctgtccattcctcttctaagctacttccatcactgccagcagcccctccttcatgctcagcccttctgtgccagggaaaccacccagctctccacttccattctcacagcgactcctgactgagctgaggatgtttgcaccttttccttcccctgtcgtgccaagcaacctttcatggggcatgtctatctacccaggctacatgtccccatgggcaggctacccagctggtggcctccttccattccaggtgcctctatttcactctcatgaggttgctgaagtggggttcagctccagtgatgatgagaatagggacgatgatgtgatagaggtcactgggaaatagctggggagctcctctgctcttcaattggggtccccaggaggttgcccaccaagctggaaggcaatgatttggacttctccagaataggaaacttggcagaagagaacacaaaggggacaaaggagggtggttggccatggtggcagagctgtgttgctgtttaacaaaagaggcaaaaaaaaaaaaaaaaaaagcccaacagggcagccaacagcgggaaattgaagacccaaagcagggctggagaactgcgcagcctctcccactccctgccttgctcatgctgtctgcttgcttgctcgcccatcaaagtgcaaaagctcacatcccatttctgtctctaggatcattctttccaaagagacctgccttactgagtgatttaacttggcctggggaggggagggaagggaggaagagggaagagcgagtgagagaaggagggtgggcaggggagcaaactgtgatcccaggtgaagttgggtctttttatggggtggaaggaagctgaccaggcttgtgtgtttgtgagtctgtgtgtgttgatgtatgtatgtaacagagcaggagtaaaggtgggaggggagggagggagaaacaaagggggaaactgaaataaatttatctttcttctaatggaaatcagagtttggtcgttcatggcacctattagtgtgaacatcagggtgagcccaggtgaagaaccatggaaattacaagtttccttctggttgggggaagagaaggcccagctaactcaagtccctggttttaagagccacatttgtttgagaatttgggggaaatcatgagagaaaatgggcattaccaatctgcgtctcttaacccccatggctctctgtgagcagcgtggaaggttgtctgtgtgcagaggctgggagggggaggccctggagctgtggctggaaaagacatttttcaccggtgggacctgagcccccagctgcctatcctggtgtctttcctgttcctttccttcccctttagagagctccatgttaatttatttcttatgggcaattacttcttacttgggcttttcatgtgtcttgtttgtttgtgggtggggtgcggggaggttaggggaaaagagagtaggagatagagatgttttcagatatcccagactccatagctactggtgaaaaacaatcctgggtggatggatattgatgagggaaagagtctgtttgaccaaggtttggattaaacaactatatttttgagagattgcttttcagaaagatcaaggaatcctgagactggatagttagtgggaggtgagactcattccacagaaattgaaagttgggatcagagtttacaactgggaagtcgggaagcccagatttggagctgtgtcctcctgggatgatcttagaggctggctgtctatgctgaagagtgaagctgtgggtaggtggttgctgggttgagggacttttgatttcttgttaggaaatgtcttcggatgacccacatgggcctggtgtctgctgcctccatcttcaaaggaccatggagaagccctttctctgtaggagtcataagtttgggttttttcttaaaagaacacattagtcattctgggtctccccttattgccaatgccagggaagaggcatctagtccttaagtacaaacactggctgtcttcctattcctattagcgtccctaccccctctgcatcccccactccccataccccaaggctttaccagatggttctttatgatgaagaaagtctgactttagagctttaccacctcaccttggctccctccttactgggcagatgctggacttgcctcttcgtagcccagaaggcagcttagtcaggtcatccctatactagctcctgcagccctctgaccagcctggttccatcattggagggccatagcagactctggggtaagaatccagaaaaccttctcagcagggaactgaaaccagtcactggaggcatagatttgtgaaattgccagagagcaaatgggtattctgagaggcagcacatggctactggctacccatgttccagagactgggtcttgcttctcctcagcagaggccatcattctgggaggctcacctgactagagaaagctttctcttatatgtgcagtttctattgtgtagaggggtggaggtgggatcatgggaaattggagtgctaccaggtccctggtttttgcttttattaaaaaaacactcacacacaaaaaaaacaaaacaaaaaatgtggggccacgtgcgggaatgcagaggatctgactgaggaatttcccctcgctattgccttccatggaattttttcaagggcctctcaagccccatccatctggtttagccaagttctcagcctggggaatgcagtactacttaatgattcaggtttgccatttgtagtgatgcttgatttccttttcttaatatatttgtagataaaaactgaacagggacaaagtagctatttaagaaaggcaatgaaccatggtgggtcttatcattttctttagattggatatctgtgaagtcctcacccctctgagttatgctttttttcttttcttttctttctttctttctttcttttttttttttttttagagggagtctcgctctgtcaccaggctggagtatagtgacaaaatctaggctcactgcaacctctgattcaggggttcaagcaattctcccacctcagcctcctgagtaactggtactacaggtgtgccccagcacgcccagctaatttttgtatttttagtagagacagggtttcaccatgtcggccaggatggtcttgatctcttgacctcatgatctgcacatctcggcctcccaaagtctgggattacaagcgtaagccaccgcacccggccctgagttatgcttcttaagcgtctatctcatcatctcttgatttagggataattctgtctggtgcttggagacctcttccctaggaattagtgggtggagtctctatatacttgtgattcacagctaaatatgaaatttcccaatccaggaggagacagcaaagagctggggtaaagatgtgcagactggttgaaacacttagccaaacttaagcggcctggatgggaccatcactcccaaagctgtcagcagagaaacgccctctgtgtcaatcaattcaagcctggtattgctctgaaattgagtcctcatcccatgggggaaggtctctgggggcttttcattcctttatactagtgttctggatataacttcctgcttcccactttcttttttgatttctcagaagaccagtgtctccctctgaaccgtggccttctgtgcaccgagctcagtggctcttccccaccaaaactcctaagagaagtcatccctccccaaaaggatccccacaagatgttctggccctctgctgactgctccctcgaatcagcacctcaaggactgtttgagaatgctgtgctctccattggtcaccttcggactccgtttccctgctgccatgtgtattcttctcttctgccctgtgtattccatggtgacccccttaatgtctgttctgtgccactagcttggccctgggccttttatttatacccgagtcttacaacgaagagtgtcctgagcagacagtgtccaccttctttgctcttccgggtcctgagtgtgctcctttcccttttgcaggtctattggacatagtaatccggtgtgctggggaggggtagccaggccggctacagagtctgcaatgcaggggcttggggaggtttgggttctctctgccaccactattgagatgatattcagaagagagaggacctcatactgtgaccagacccaagacccttcctggaagacagctcagtccagctgtgtgtgtgtgtgtgtgtgtgtgtgtgtgtgtgcgtgtgtgtgtgtgtgtgtgagagagagagagagagttatgtgtgtgctgtgctcatgtgcacctgggtgtaaaatgactgttagctggttgtgttactcagggtgggctggggactcactggaagaatcccctcagtctgcccaagacaggttttttccttgtgccctcttcagagaggtcagggaaagagggtccaggtgggcaaaggcggagatgccacaaatgattaatcactaaggccagatggctgccaggaggagtgggggatgatgaggtagcccaagggtccaggcaactggctttggttttccatcttctttcctcaggatgcccctgaggcctgggacctgtgcctggctttgaggagcatctgtggcttggcgatccagctgctggggtgatcatgggcttccctcctctcagcagggccggagttcctggtccagagactgaacaactggctctttctgtgacatatttatttttacttgtgtttcatgtcacttttttgaaaaaaagcaagcagaacaattgttaagtcagtatagctgcctatcggttttccttatttctctttttgtaaaataaaattaaaactccagaaggcagtgttgtttgattgaggaatggtctggacactgggttggctgggtgctagtgaaaggaatagatcttagaacacagtgggctctgcgatagcccttgggtggtgagacaggcaggaacagaaggaagactgctggcagtttctttgttacagtggggttcactgggctttttctgcttttgtttacctgaagagggatgtatttccaggctccaggggaaacagcaagctgacttcagagtggcttgaggctagctggtcctcagccatgacaagtcctgcacggacagccctgaccagactgtgaatggcggggtattgggtgcagtgccttcagagggtgggagatggttgtaagggataattggaaggacagccaagaaaggaatgaggccaatagacccaagttcaggcaagctgatttattgtcagtcctgcctggctacctcttgacaaaagcagagaaggcagccccacttataggctagagcaaggttttataggacatagaactggatcagggtgaaggaaaaagaaaagggggggggtcctttgtgccatgtgtctgaccgcttcctggagatgtttttcttgccagttctcttgtgcaaagtagacgtcttaaccgcatcctgggacagctggcctctggtcaaacagttacaggcaggtttggggtagcgggttttactttttggcctttggggcttagtctatgggagggggaaacagtccagttgggtggaccttagcaatggtgtatctgtaagtggctggtggcagcgacaacattcttacgctgcatgtgtattgttcagttgtcatctgtgttggggaatctagccactggcccacagagagttaaccagagcttgggagtgtgagaggtgggaaagagggaaccatctactccagcttcctgtctaatttcttcaaggggaggggccctggggaaacaattccttggaaatgtacaaaggaggatagagaaagaatctctgtaggaattccttgggcagaggaaggcaagaggacacccaggtcacgtcagggctcatgatagggaaatctgtgctatggggagatgggactgggagtgaagggtgggtgcggcagatggctgggccagcaggtttcctgccacctgttaaaagggggtgggggtcgggtaaagaaagtgccttgcagagtaggctgctgcctcccggtggtcagccgcggccttgcatggatcttgccaagggagtttgcttggcggtgttggaagcggcctgagatgaagctgggcgggctgatggcctgcttcccccgtcaccggcagactctccttccacgaaagacttgctgaagctcctgaggcacatgctgaactgtgatgtgggactctggagttccccaaccacgctaaaggaagtgagcagagaggacaagatgaagaatgggcgcctccttataacggcttcctgggaaaagctcaccacttgatgagaagcagaactgaccagcaggccctgcaggcagaggctgtcagtctctgagccagtgccatggccctctttgtgtcaaaggaaatgcttccaagtgaatagcctgcctgcctagggcacctgagctgagcgtttgaccgtgtcctgggagttcataggtaaaataactgccgcgacctgcactgacccggaccggagtgcctgaaaggggccagctgcctattccgccagtccgcctggagggctgggacaggcttggtcctgtggacgaggttccatctcccctgcctgcggaaggaagaacgtgaagcacagagaaaggaagcgggatgatgactgcccctgtgtgcccagcctgctctttgctagtgcagtagtgggatccacaaggtcaaccaccccatgattgctgactgtttccaccaccagtttcctggtgttcccatctgcgggatcctctcccatcagtactggtcagaataccgaagtagctcttagcctcgacggtcttgtagccaagcttatgaacatcgttgtcaccttccccacctcccaccaaaagtctaggactgtcgcgaggggagggttttatctctgggcccctggcagagtgctttgtggtttatatgtcctcagaaatttgaagggaagagtgaagcgatcatcaaggagcttacacttgacctgggagtcacctaagctatcgctaaccagaaaggtagaccagcctcccccagccaccaccagggcactgagggaggagcctggaagggggcatgcccctgggatgtggactccaggagggcggagccttggtcttattcactgtatccccagcccctagaattgtcctggcagggagtgatcataaatgttggatggatgaatgtgctcacggagcggggaggggtgggtggaggcaggaagcagatatttggatccaccagcttcttccgtgagcccagactgggcttaagcttcctcagctatgccttgcttggttcccaagtcttttgcgaagccataatgagagaaagtggcaggactaacggtggtacaaatgccagaggcggatactgctgtgccgtgtctccctagcctgtgcaaacgctcctcctcagcctcagctccctggccccagcctggccctctcctgtggacccccgggctgggctgtcactgaggtgctccggctgacccagatcccctgggtgttgctaaatcaacctcggcaactgtagagtttgctgaaggcgggaaggtagtccgagggttccgccccagccggctccagggtcaggcgcacgcccgtggccatggagacggggagaggaggcctcggccctcccggtccagcgcattcagccaaggctacggccacagccacgtctagccagagagggggcggcggatccgtgtgcgctgcgggcagtggtggaggcggggccgggccggaggcggggccgggccggaggcagggcgtccccactgcagcgtgggtctgggacaccagtccacccctgcgcgacctcagggcccccacatcctgaggggaccggctgctcttggcctctcgcctcgcccatcgctggccccggccgcgtcccagggcctggatgcgaacttggggcagccctcacccttctgggcagtttggaaggtgagaggaagagagaggtggttactaaattcccttcaggggacaggaagtgctcagctgagatggcagatcagagtgagggctggtcattcccaaggcaagtggggggcctagatgctaagagttttgcagctttgggctcagagacgtccaacaaagattaaattcttgagtctttctggaagccagtcaccagagaggagagagaaagcggaaatggggtcctggagtccgagtgtctgggttcatgttgcctgcattttggtccacatggctctgtttaatacctgtgtgaccttgtgcaagtctcttaacctctaaccacttgcacccttagccatacctatcttgtcggattgctttgaggatgaatgaagcagctgtgtttcaacacttagtgcctggtgtatagtaagtgctcggtagaagatttctcatcattatcatcaaagacaacaggaatgaaactaactggagacaagatgagtaggacaggcagaaaagagagagagatactgatgggtaggagcatagatggctgagaccagtgggcagcacctccatgtcctgacactaaaagtttagaaatttactttgcctctgccgggtgcgatggctcacgcctgtaatcccagcactttgggaagctgaggcgggtggatcacctgaggtcaggagttcaagaccagcttggctaacatggtgaaactcgtctctactaaaaatacaaaaattagccaggcgtggtggcgggtgcctgtagtcccagctactcaggagactgaggcaggagaatcgcttgaacctgggaggtggaagttgcagtgagccaagatcatgccactgcactccagccttagcaactagagcaaaactccatctcaaaaaaaaaaaaaaaaggcagaaagaaaagaaatttactttgcctctttgtgagcaaatactgtgtgttcatcgactccaaaaataatttttttagtgtaaaatcaacacccagaacccacagggaacaaataattccacagagctaagttttccacaaagctgcagtgtggccttttcagcttcaaaaccttttaaatgttaaatattacttttaaataattggggtgggaatgtacccccagtgggtcacatgcttcccttcctctttaaacagttttctctgtgctataattcccccctctccaggcaactcaggtcaaggcctctgtgtaagagggttaggcctctggccccgagctgcctggagacctaggcagtctgcccggaatagctcacacaatggttctgtgttgtgttcctgggcccgctcttgaacagcttcccttcctctatgcgtagctgttacttcttcctgttgtgagactccccttctggcagccttttcctcttactcttcactgtttcttctatgggctggaaaattgagatgaagcttgttaacatgggtgattcaagtctgggaagcttaatgctgaactttgttctagctgctcaggccattttgctgtggtcttccctctggttctggatgggtgagcttgctggagagcaaggtccctgcaggtcagatgtacttagcaaagaagagtttcctaagaaattctctttcctacacacatttccccctggggggatttttttccctctgggttccctgtttgttgataggtgtttggaccctggtattcatctgtcctccctctggcagtagtccctgaggtttcgggaggctgggctggcagtgtggctctgctgtgggaaggaagaggtattgtggaggaaaggcaggctggctggcatctggtatatcttgggggagacttgtccaggccaggagtatgtccctggatgactcactcctgtgcccctctgtgactcagtttcccccggtgtgaccagggcttccagctgacaggtagagctgttctgagatcctcacctactgtgtttaagaaataaagaggcttgtggcttcagtcatcctttatggctctcttctaggtcactacgtgctctggcccctccacctcctgggtcaaagcacccaaggcagggctgaggaggttgggccagaaccggttggcgggcaggtgggcacattgtcagagatggctatcagcctcctctcccttctttctctgttgcagctgccttggggtgcggtgcaggggtccagagccatttcggacctgttactactgggcctcacaggtggcctgactctgttactgctcctgacactgctggcctttgccgggtactcagggctgttggctggggtggcagtgagtgccggctcaccccccatccctacaagttccatgtggagccctatggtgaggctgggtggcttttcaccagagctgcagcatctcccccaagctctgctccatcgctgtccactaggacaaccccacatggtaaggagcctccatggggttctgccccacggatggacctagtgggccagggcttctttggggagggtagttttggttgctgaggaaagggtggaaaaatcctcaagctggccctgcaggcccctcctctgtgagcttgaagcacctttcagatttagcctggacttctgctccaggaatccatttgcaggctttctacttgcctgggtctggttccccttgaccatggctactcatggattttcaaatgcagtggatgataccactatgagtccctagcttctgccaggacttcagtcccctgctgcctcttcttgtcatccctctttccatctccatttagggccagtcctgtcagcccaagccattcagattctggccactctctggggttacatcatgctgtttctgtgctttccacccctcagctctcctgctgtagttgtgggctcttgagggctaagacggcagggttggggggcaccagaatggctgaagaggtaagattccatgccccatacccaaggtatatggcatttccttagacctcaagctgcctagttgggagagggcctgggggtctagtggaaccagatgagcagctcagaatgtccagaacactggagtcatagatgaacccagcatcattagcaccctatgggcatcaagctgttcttacaacctatggtgagtaaagcttgccaatgtagcctcctgctatgttatagggtagcgctgccacagctggatggggctggcagttctgccaagggttcttcagcctctaatactgagccatgccaaaccaagcactaggaatccccagttctgactttttttgcctggaaagctcaagtggacaagccctacggcctacccaatgtctgctgacccggcacttagttgaaacagggtgtgctggttccctctctgccccaggttctgctctacacctacactttggagatgaatcagacctagccctgccctcatacaatgggataatttaggaatcagagagaccgaggggttgaggaggatttattattattattattattatttaggtgaactggcccagtcagattaacatccaaaaaagactgagccccaaacaaagagtcaggttaccttttaagcattttgtggggcagggggagatctgtgcagagggaagcatattacagaagcgagaaacaaaaacagttctttaattgagacatgcattacatcatttcttacttttcaaggaaaaacatgttttacgacttgagtttatctgtctagtgaccttgcagctgcacagctagagaaacagggtcttcacaatgcctgggaaagggagagataaggctcactagccacagactgaaaaacagacagttgatttttaaaggagtccacctctttctcttcctcagggggaattgggttttctaacatacaactgagtttttgctgacacattctttaatttcttttaattcctgttctagtataagaccaagctgtgcccccaacctccttggtcacgtgttgtcaggacctcctgaggctgtgtcacaggtgtgtcctcaactttggcaaaataaactttctaaattgagacctgtctcagatacttttgaattcacactactaatttcaggtagaattttaaattcttaacatagaaacaaataaggccaggtgtggtggctcacgcctgtaatcccagcactttgggaggccgaggggggtggatcacgaggtcaggagtttgagatcagcctggccaacatggtgaaaccctgtctctactaaagataaaaaaaaaattagccgggcgtggtggcacatacctgtaatcccagctactcaggagactgaggcgggagaatctcttgaacccgggaggcggaggttacagtgggctgagatcgcaccattgcactccaacctgtgcgacagggcgatactccgcctcaaaaaaaaaaaaaaaaaaaaagaaaaaagaaaaaaaagaaacgaactagttaaactgagaaaaattaataaaagtatgctcaaatttactgacagaattatgggtaaatctaattagattctatccattttaagtaaataagaaaaaaaattacgaaggagcctttacctttgggaaatgaaaaaaccgcttttgaccagttgttccccacaggtacacaccccagttcccagccaagccaggacggcctgtcccggtgcctggagggcagggcccctgcggtctggggttggggtttgtgttctggctccgcgcggtggtctggaccgcgcccgccctgcctgggctcccagccggaaggacggagcggttgcggggcgggcgggctgcgagccacacagggtgcgggcggggcgggcggggctggggtgtcgggggctcggattcggagccagctctgccgtggggcgggctggggcaggcttcccgctctgggaaatttgcccctgctctccctgccagttgcggtcgtgggcggcctcgccttggagccctggccacggagccgcacggggcggtagagaggctggtggggagggaccagcgggcggtggaggggcggccctgcaggcgacgcggggactggaaagggcgcctgggtgggaagaggcgctggcgggtgatcgtccccaccgggccagtccccgggatctgctgccgcccctctccgaaattcacagccagagcgggcgcactggtgtgtgtggcgcctggagcgctagggtccccacccaagtgcgaggcccccgcggggagcccagcccaggggcgtccacagtccaggccccagaccccaggtcctggctagattcgccaaagtcagaggctggaatctggagggcggatgtgagggtgccagctaagcccagcccctgcccggcggtggccagcataacgcggtgacactctctggagcccccactgccaccactctgctgtcaagcccgctgggctaagggatccgtctgcccctagaggtgcgcacccaacgccaggcagagggagctggcgtggggctgctggcggtcaatgtcacccgagatgaggaggatcttctaggaggggccccggggccacagaacgagaggggagtgtgcgctgagcccaccttgcaaagacgctctggtccccgaggggcggcaccttcggcctccagccaagtcgccgagcgctcccagtgctgcctgcccggcacctgcactccagactccaggctgccaaccaaagaggaagcccgccccctgggaacaggccactctcagcttgggcgagggaagcacagacacccccatccctagcctggcagccacacacagggaggccatcacctgacgattgcggggggcctgagttattgacaggtgaatatgctgggaatgaagactcctgggcctgggagggaggggcggtggtgtggagggcggtgaatgcctggacctctgggtctccaggctgccagcggcctgaccaggctcccggtgtcctcctccaacctcagtttccttacctgtcccagaggagaaatatggcagggctgtttcggtgattaggccggataatcctggtaaaatttattagcctgcctggtctggatattattttttctgactttgttaagaaactttgctgcccaatgtctactcttggaaagtgagttggggaggcaggaagtcaggactctcacccttggcttcagagtcccttccaggtgccccctccctttaggctcaatgaaagcacagagctggcaaaattcccttacccaagacagctgtagagtccagaatcagaagatcttgttttctgacccaaggaccgtttcttaccccaaaatcgaaatctctttgagtggtcagcttcagacaggagtctgaatttgattgtttttctctagggttaacccaaggcccttatgataagcgttgcttcatccccattccaccccttttcctgccctaatgcattgggggtccttaaccgtagtgacctggaattgggagcaagtttccccaggcggggcatattggcctcctcaacaggctggcctggccttggcctgataaacatcagtcctggggcaaaagacccagggcagggagatctcccccccacccccactttcacatgctgcagtcatttaatgggctgtggtgacctatcagggtcccctagcctgcaggatggaatttaactttttgccatagagggggaaactgaggcacaaagctagtgagtgaaaaaatcagaaagactctgtgactgggaaacactccccaggaccaaggtccctacaggactcagccccttttgggttgtgccagtggttggcatgtgcaccctggttgtcgtctgtacctttctggggctgagggtggggtgggtgttctggcaggacaaggtctgtgacccacgggatagagagacattgccctctttccctggccttgggcagagcaagagttctgttctctaatgtatgtaaggaccagtgcctgtgtgagtggaggtgggactccttttttcttgattaaataaaacccttcctggggctgcttaggggattctggggcttgtgtacctgacagttgggtgtggcatctgggtactcagcttgtctgtgccttgctgtcacttctccagggacagccacacacttctctcttagtccccacacatgcccagtcccttactttttcgcctgggatccccctgcctgaatctctcaacccagccactgctaggtctccccagggaccctgtaatccccgggatgggattgccggaggcggtgaccctgctgcctacctctgtctgaagttagggtccctggcctctgcctgcacctagtggacagggagggtgaactggtcaaggataggctcttggcctagcacagggcctttctctgcacctcaccatatagtggtggaggctccaatcatggctggcctgggaattgctctgcattgtgtctcagattgcaggagataagcagatccgaggagaggagcacatcctgaaagagaatctgaattttccaactcagctgaaccctcggcccctgcccttgaacacacattctggttttcttaccaagtccctgcttgttcctgcccacctggccttcccaggcaggtgattggtgtttctgccccatgtgtgctttggctgggagggtcactggtgggccaccattcagaaggcaattaaatcggcctcattatctggggtgttacacgaagttcttggtctcacagccaatgaaatcaagggtgcagacactccaaaggtgaggttagagaagaatttaataagtgaaaggcagaaagctttctggcacagagaggacccccaggaaaaagagttgcagttttaaagtgaaaagcccaagggattttataaacaagctggtcgggagaggtggttcatttacataacgtgtgaaaaaccagtcaggactaggtgtgtcattgcgtcctttgcataaggtgaaaacttctgacagtccccactccacactccaacattttttttgttttgagacggagtcttgctctgtcgccaagctggagtgcagtggtgtgatctcagcttactgcaacctctgcctcccgggttcaagagattctcctgccttagcctcccaagtagctgggactacaggcatgctcctgagtagctgggactacaggagtgctcccgagtagctgggactataggcgtgcaccaccacgcccagctaatttttgtatttttagtagagacggggtttcaccatgttggccacggtggtctcgatctcttgacctcgtgatccactgctttggcctcccaaagtgctgggattacaggcatgagccactgcgcccggccccactccaacctttctagtgtgcctgcaggctccttagcgtgagttactccatgttgcttatctcttcctaccatgcgtgtgtaagtgtgtgtgtaaaaagaagtgggtggcagaaccctccaaggtaaacgtgcctgattcagagtagctcttttttatcagtgctgttgcaggcactccccttgtgcaagcctccttgtctgaatattttcaaaaagagagagaaatttgctcactggggtcctccgtaggtcagtgaaacttgctgatcacatagcagttcctttctgtgttagaacttgcctccattatctgcgtttccagcctgatcttttgagctctctttgctaaaacagaaatgacctccgggattgcttttccttataagagaagctgctttttgttagaagggaattctaccaaggactctcaccctatctgtctagttgatttctttctctcccctctctaagtaccatctggtagtgggcagcactgagtcattgtggtctctccacagcctgctgggctctctgcatccccccaagggtcaccattatccactcttggagggcagcgcagagctctgggaggcgcctctttctagcttccgtccatactctcatgtgtgtgtcagggtcctcctctgagagattggggtatctctgcaggcagatggcagtgaggtcaccatggggggggctacctcccccctgtcttgggcccaggtcttgggcccttctgagagacactggcccagccaccccatgaatcctcatggggaggaaggcagctcccatcgcagccttcaggaagaggaaaaactagttgggctgtgagggaggggtggccgcagtgctaaacaccaggaagaagaggaggccgggcctgcaaaacttcattcttagtaggtgcccaccaggtcctactaaggtccactgcacagtggcaaaaggtctcagaatctcataaatggacaccacccaactgccttctaggctcttggcactgtggacatctgatttctcccttctggtaaactgatcccaaggcctgttctggctccttcaaccagctgggatgcccactgggtcctccctgctgggcttgccctgttgtgcctccttgagagggtgagaacttccctggaagattccctcattccctgaagtcccccaagccaggtcgaagcaccctggacttctcagcagcagcagcagcttggaggaaggagacagaggggaggagacacacagcccagctctgacaataaccaggatgtggggggcatggtgttgatgctcctgggagccttttttagcccaggaaagagacctcaaaaggccagcactctccctacacaggagaagaaactgaggcttgcaggtagacagaaggagcctttgaaatggggttgacccagataggcctccgtctcccacttctcttatggccttcacatgccaggcccctgactggactcagacccagtagataagaagctgctggccaatccaaccacccaactcattcacttcaactgtccagacaccagccatcctacttcctccatttcctggatgaaaaactacaagaggtttcataaaaagcatcacatcaggacatcaaggttggcctggtggcaagggtgtgacccttggacttgtgagcaagtggtggtggggtctaaggtagggggctctgcagggcaggacctgtgatccagtcctctcacctgagcatccacccacagttgcgacattagccgtggagcctggttatggagagcgtggtggagaataagttcggcagcatcctgcagatggacatgatggacatgctgggtgagggctgcaggcaggctcaggcagtgaagaagccggccagccctcatgtgcccctgcagagtgctctcctcactggccattctgcatacatggctgctggtcaaccagactgtggtgctgggcggtgaggtgaagctccgctgtgaggtgtgcagggacttagcatttggaggcgaacagcagcaaggtgggcaccaatgtcatgccctcctcaccatgctcaaggtgggtgctgctgccagctgggtgcaagtggtaggcaggctgtggggggggctccacttcactgaaatctaccaccattatagaagttttagagtagcctgcaaaagataaatttatggcacagccagaagacaaaatcatctgccgtgagcagttctggatatgaacttgctgctggttcataccatcttctacgaaccatagtctaaacttagatgcagttttttgtttttttttttccgagatagggtcttgatctgtagccaggcttgtgtgcaatggggtgatcttggctcactgcaacctctgcctcccaggttcaagcgattctcctgcctcagcctcctgagtagctgagattacaggcacacgctactatgcccggctaatttttgtattttcaatatagatggggtttcaccatgttgaccaggctggtcttgaactcctgacctcaggtgatctacccacctcggcctcccaaaatgctgggattacaggcgtgagccaccacgcccaaccaaagcagtttctcttaaagtaacaatatacgtgtcagtcaataacagtgggaatgactcctgtgactactgtctctcgtaatcctttcaaaaacatttgcttctccctttgcaaccatatgctctatgaattcacacactgagtaaagaactctttggtgagcttatcatgaatctcacatactaaacaaacataatactgtattaagatctcctataaaatttgagcaaagtctatttgaataatagtagatcagaaatgaaagaattatgttgagctttctggaagatgtagaattagttattttgtgtttatgagttctctattaacctacatttgttacttaggaatatatatattttatagaattgggtgcgatggctcatgcctgtaatctcagcactttggaaggccgaggcagatggatcacttgaggtcagaagtttgtgatcagcatgggcaacatgataaaaccccatctcgactaaaaatacaaacattagctgagcgtggtggcacatgcctttaatcccagctattcaggaggctgagatgtgagaatcacttgaacctaagaggcagaggttgccctgagctgagatgcaccactgcagttcagcctgggcaacagaaagagactctgtctaaaaagaagaagaagaaaacaaaaggttaggaatatatatgtttcttattctgtgaagtttaaacggatgcacttgctcaaaaaatgaataaattttactccaaatttttgcattcttcaatgcatcttgtctacaataattattactgtcatgtcctagtggtgattttctattttgcattatctatctacattgattagtacttggaattttttaaagaagtctcttttctcctatgttttttctttttaaaattattattatttttttgagacagagtctcactctgtcgcccaggctggagtgcagtggcgtgattttcaagcaattcttctatctcagcctgacctcctgttggccaggctggtcttgaacgcctgacctcaagtgatccacctgctttggcctcccaaagtgctgggattacaggtgtgagccaccatgcccggccattttgggtaaaatttaaaggagaaacaatgtatttatgcagactcaaaggatctgcctccaaatatttataaataccattttatcttaattttttatgactgtttaaaaaaattataacagtactgtgagatatataatgtacagatgtaaaatttatgaataatataaagaattaaaaaagtaattaaaactctccaacagcaagttcttcacattttagctttattaaaatagtacagtgttaactttaagtagattgtaatatgttaaagatgtatatggtaatccctgaagaaaccactaaataatgtaaagaggtgtcacttaaatgttgataaatgaattaaattaaatttcaaaaagtatttgtacaaggatgtttatagaccttttagtcataatagcttaaagcagaaaacaacccaaatgtccgtatcttggaagatgaataaacaaattgtaactcattcatgcaagagaagactactcagccacagaaagaaacaaactactgaagcacacaccctggatgaatctcataaacctgctgagacaatcttgaaataaaataatacatattgaatgatgtcaggcaaaatgaaccaatggttttaaaaaaaaaacacaccaacaaatagccttcattgacaataaaatcatctgggaaaaaaagcatgaggaaattatttgagaataataataatattctatcattctattctagattccatcaatagaataaaaaaattctatccattcttaaaaaatacgaagactatatatgagtatatttacatgtcaaaaatttttaggatttgtgcctttcaatgtttgtatatttgacctcacaacaaacaaaagtgaaaaaaataatggagggtggacaatgtgttgaccagaaatgactgaagtagagagctataggtgaaacaagaatgagacatgattaatagttctcgaggcttcatggcaggtctattgaatttttgttgttgttgttgtcattgtttttcatatgtttaaatttttatataataaaacacttaaataaaaacacaaaattgatccacaatgttaactcttaagattatggttattgtctaagaagaaaaaagaaagtgattgttggggcatgaatgaggttagttttattttattttattttatttattttgagatagggtcttgctctgtcagccaggctagagtccaggggtgcaatctcggcttactgcaacctccacgcacgccaggactcaagtaattgtcccacctcagcctctgcagaggctgggaccacaggtttgcaccaccatgcctggttcttttttgttgttttttttttggagggagaatctcaccatgtttcccaggctgatctccaactcctgagctcaagcaatccacccacattggcatcccaaagtgctaggattacagacacgagccacagcacccaacctagtttcattttctgattacagaagtgtatttctttttaacaatgcattcagctttacataaatgaatgctttgtgcatacatttctgtataaatgttatatatcaataaaaaattatatagtactttttttgttgttgtttgttttttgggtttttttttttgttttttttttgagacagagttttgctcttgttgcccaggctggagtataatggcgtgatttcagctcaccgcaacctccgcctcccatgttcaagcgattctccttgcctcagcctcccaagtacctgggattacaggcatgcaccaccacgcctgactaattttgtatttttagcggagacagggtttctccatgttagtcagggtggtctcgaactcccgacttcaggtgatctgcctgcctcggcctcccaaagtgctgggattacaggcatgagccatcgcgcctggcccatagtacatatttgaacaaaatgctaacttagtatctcagaataatggcaacatttttttgtttgttttatggtggaacacacacactcagggcataattatacagcttctaatattccaaaaagagtattcaagccctttttgtttgtttgtttgagacagaatctcgctctgctctgtcgcccaggctggagtgcagtggcacgatcttggctcactgcaacctccacctcccgggttcaagcgattctcctgcctcagcttcccgagcagctgggactacaggcacgtgccaccatgcccggctaactttttttgtatttttagtagagacgggggttcatcgtgttaggcaggatggtctcaatctcctgatctcatgatccgcctgccttggcctcccaaagtgctgggattacaggcgttaggcaccgtgcccagccaagccttaactcctgaatgagaccatacgtctttttattttagccccaattcggtacatggcatgtttttaattttaggggaatgcaacctttattctagaaaatttttccctcacagtaacgatcaccaatgtcagggcacctacattggccaatgtcagggccttgtgtgcactcagtatatatacaactgggttggttcaggaacaaaaccaatagcgacgttggttgtgcatagaacaataatttggtaatattggtaagacaaagccatgacttagcggcaaacattttttcattcatttgagaaaaaatttgcaactagtcacctaaaagtactggtttacagcactggcatttgaccttggctgcgctctgtcatcacctagagatatttacactattgcccaggttccattgcaggaattctgatttaattggtatgtggcaacttgtgtttgggggattttaaaagacctccgaagtgatttttacatgcagactcgggtgaaaacaattggttcagggtgagggatgtattcactgtgtgtgatttccaggtgtgcttctggagctttgccccatggctgcttctgactttgaaatcttcaacagcagctctgccattgtaaaaatcaaaatgcaggccaggcagggtggctcacacctataatctcagcactttgggaggccgaggcgagtggatcacctgaggttaggagtttgagaccagcctggcaaacatggcaaaaccccatctctactaaaaattgaaaaatcagctgggcatggtggtgcacgcctgtattctcagctactggagaggctgagacaccagaatctcttgaagccaggaggctgaggttgcagtgagccgagatcacaccactgcatttcagcgtgggaaacaaagtgagaccatgtcttaaaaaaaaaaaaaaatcaaaagacaacttcaagatgtactcaaatattttgctaaattgcagcagaatgaaatgtcttccggctggggtcggtggctcacgcctgtaatcccagcactttaggaagctaaggaggatggatcacctgaggtcaggagttcaagaccagcctgggcaagatggcgaaaccccgcttctactaaaaatacaaaaaaattagccgggcgcggtggcaggcgcctgtaatcccagctactcgggaggctggggcaggagaatcgcttgaacccgggggcggaggtcgcagcgagctgagatcgcgccactgcgctccagcctgggcgacagagtgagactctgtctcacacacaaaaaagcctaaatttaaaaataattattctattcttttcatgtgtgagcagccatatagtatattatttacaaatatatgagaccttacacacaacgttaaaggcaaacaccttctgcggtgtgcttggctcagctcaggcaggaagccctgcctgaaaaggctgcaccttcggctgtcactctgtcctcattcggcccagcgtttggttacatcttctgtcactcagggcctgagggcggggggggggggggtcttaaacgttatccattcagcgacgctggcctgggaactgtccaatcaggcacgcagctggagcggaaagggcggcttccgggatgtggcggggtctttgtctctcgctgcagtcggagtatggtctagtgttcgctgttctgcgtcctctggtcctagaggcccatcctctgtggccctgtgacctgcaggtattgggagatccacagctaagacgctaggaccccctggaagcctagaaacggtgagagtgccgggtccgacatcccgagagaggggaaggggctggttggaaccggtggcaagaggctgtggcgggactcaggcctccccgcagtcggctccacaatctgcgccccaagttcgccttgcccagcccagcctcagtccccttcagccatcagattggcggctgcgctggcagccggacccccgggcgtcctgtctcttccctgcgcagtgacggtgccctggcctggagccctctctgggcagctctgcacccgcagcgtcgtgtctctcccagattgtgcagggaccacgggagggtggtcaggggagaatcctgactcggggtgcgggttcacgaatgggaagagctttggtttggtttatggggttcctagttcctcttttcttctattaaaaatttatgggagttatcgcgaaaatacttaaaaatttaagcaaggagtggttcaaaagttatagagcacccagctgtgggttgtagtttgtggtcggtccatgggaggatcttgaaggaaagatgcagatgaaaatacccaaattcaataatcggttaggtatatttacgtagtttcttaattttcaccttgagcctacaaatttcctggttgtgtaatcagagcttacttggcagtttatcgttagttaagcctgaattttgtttcccccaatgtagtaatttctaaaaaaaaaaaaatgcatttgagtttgattttttaaaattaggaatccaaagattagagccacctcagtctatttgccgccacatggggctgattttccctggcatttttcacataggtcccaagcaggttctcaagtcaaccccccacaccccatttctccagcttaactctggcttgcagtaaaatactgaattttcagttccttctgaaaatctcaaatgccaacttcttttccctaatttacattattatttgtcctttagtgtacatttttcatactgtattttaattaatcattttttgacaaagcattagatggcatatttaaaaagatatgttttctgtttgtaaatatttcccatgagaagaaagcaaggaatatcccgatagtgaattgtaaaaaatctctgtgcctctttttcttttgtcttccctaggcataaagatcttatgagaatgttttagtgtcaagatgtttttattttgcaaacgttatggggtgatttgtgcttagcaaccctgtcgtttattcttggtcctggctttcagtactgtctctgaataaaccaagataaccgctatggcgatgtctgctagagtatctagtgaatatcagctcctaaagtcattttctttcgtaggacaacctgagatatggagtgtagcctctcaagtggataccctggggaaaagatgaatctcttttaacttttatttttggttcaggggtacacatgcaggtttgttatacagctaaaattgtgtcatgggggtttggtgtgcagattattttgtcactgaggtactaagcatagcaccaaacaggtactttttctgatcctctttgtcctcccattctccaacctcaactaggcctcactgtctgttgttccctctttgtgtttacgtgttcttattattcagctcttacttaaatatttttttttttttgagatggagtttcgctcttgttgcccaggctggagtgcaatggcgcgatctcggctcacggcaacctccgcctcccaggttctagtgattctcctgcctcaccctcccaagtagctgggattacaggcatgcgccaccacttccagctaattttgtatttttagtagagatggggtttctccatgttggtcaggctggtcttgaactcccaacctcaggtgatctgcccgcctcggcccaaagtgttgggattacaggcatgagccaccgcgcccagcctcagctattacttagaaacaacatgcatttggttttctgctgctacgttagttttctaagaatagtggtctccagcttcatctatgttgctctatgttgcttcaaaggacatgatcttctgtgtgtgtgtgtgtgtgtgtgtgtgtgtgtttgtgtgtgtgcgtgtgtgtatgtgtgttttaacggccacacagtattccgtgatatttatctaccatattttatttatttatttttattttattattttttttttgagatggagttttgctcctattgcccaggctggagggcaatggcacgatcttggctcactgcaacctctgcctcccggttcaagcaattctcctgcctcagcctcccaagtagctgggattacaggcatgcgccaccacgcccagctaatttttgtatttttagtagagacggggtttcaccatgttggccaggctggtcttgaactcctgacctcaagtgatctgcctgcctcggcctcccaaagtgctgggattacaggtgtgagccaccacaccctgaccccatgttttatttttagtaaacctttttttttttttttttgagacggagtctagctctgttgcccaggctgaagtgaagtggtgcagtttgactcactgcaatctctgcctcctgggttcaagcaattttcttgcctcagcctcccaagtagctgggattacaggctcttgccaccacgcccgggtaattttttgtgtttttatttatttatttttatttttttagtagagatggggtttcaccatgttggtcaggctggtctcgaattcctgaccttgtgatctgcctgtcttggtctcccaaagtgctgggattacaggcgtgagccattgcacccggcctaaaccttttattttattttattttatttttgaagacagggtctcactctgttgtccagactggagtgcagtggcatgatctcagcttactgcagccttaacctcccaggctcaagcaatcctcttctactttagccccccaagtagctgggactacaggcacacaccaccaggcctggctaatttttttggtattttttgtagagacagggtcttgacatgttgccctgggtggcctcaaacttttgagctcaggcaatttacctgcctcagcctcccaaaatgctgagattacaggtgtgagccaccatgcccagccataccatattttctttatccagtatacaattgataagcatttaggttgattccatgtctttgctttcatgaatgacagggactgcaatgaacatacgtatgtctttataatagaataatttatattttactggttatatgcccaattatgaggttgctgggtcaaaaggtaattctgtttttagttctgtgaggaatcgtcacactactttttatagtggttgaataatttacactcccatgggtagtgtataagcattcctgtttctctgtaaccttgccagcatctgttatgttttgactttctaatactagccattctcactggatgagatgatatttcattgtggtttttctttgaatttccctaatgattagtgatgagcattttttttatgctcgttaaccacatgtatgtcttcttcgaagaaaacacccttttcatgttttttgtctactttttaggtcttttttttcctgtaacttgtttaagtttcttataaattatgggtattggacctttgtcaaaagcatagtttgcaaatattttcttttattctgtgtgttttttgtttactgtattgatggtttcctttgctgtgaagaagctttttagcttaattagcttcaatttgtcaattactgcttttgttgcaattgcttttggtatctttattttaaaatttttgccggcttctatttctagaatggtaattcctaagttatctcatgcattttttaaaataatttgaaattttacatttaaatctgtaatttatcttgagttgatttttgtatgtggtgtaatgaaagggtccagtttcaatcttctacatagtcctagctagttattccagtaccatttattaaatagggatttctttccagattcctgttgttagctttgccaaagctaacaaccagatggttgtaggtgtgttgtattatgggctctctattctgttgtattggtctatgagtttgtttttgtaccagtaccatgttgctttgtttactgtagccctgtagtatagtttgaattcaggtaatgtaatgacttcagctttgttctttttgcttatgattgccttggctatttgggcccttttttggttccatataaatttaaaaatttttttgttttgttttttagctctgttaagaaatatttttggtagtttgataaaaatagcattaaatctgtaatttctttggcaggatgactattttaataatattgatctttttttgtttgtttgtttgtttgagatggagtcttgctctgtcgcccaagctggagtgcagtggtgcgatttcggctcactgcaacctctgcctcccgggttcaagcaattctctccctcagcctcccgagtagctgagattacagatgcctgccaccacgcctggctaatttttgtatttttagtagagatggggtttcaccgtgttggccaggctggtcttcaactcctgacctcgtgatccacctgcctcagcctcccaaagtgctgggactacaggcgtgagccactgcgcctggccaatattgatcttctttatccatgagcacaaaatggttttccatttgtttgtgtcatctctgacttcaagcagtgttttcacagtgttgtcataaagatctttcacctccctggttagctgtatttctagatattttattctctttgtagtgattgtgaaggggttctgtttttgatttggcttttggcatgcatgtttttgatttacagggatgctactaatttttgtacatttattttgtattctgaaattttactgaagttttttgtcagtttgaaaagctttcctaggcctggcgcggtggctcacacctgtaatcccagcactttgggaggccaaggcgggcagatcatctgaggtcggaagttcaagaccagcctgaccaacatggagaaaccccgtctctactaaaaaaacaaaattagccgggcgtggtggcgcatacctttaatcccagctactcaggaaggctgaggcaggagaattgcttgaacctgggaggcagaggttgcagtgagccaagatcgcgccaccgcaccccagcctgggcaataagagcgaaacttggtctcaaaaaaaaaaaaaaaagaaaagaaaagaaaagcttttctgtgatgattatagggtttttcagatacagcattatgtcatctgtaaaaagaaataagtttgacttcctttcttcctgtttgtatgcctttttttttttatcttgcctaattgctctagccaggacttccaattttatgttgaataggagtgttgagaggaggcatgcttgtcttgtgcctgttttcaaagaaaaatgattccaggttatgtatattcagtatgttggctgtgggtttgtgatagataactcattattttgaagtatgcaccttccatccctagtttgttgagactttttaacataaaaatgttaaattttattgaaagccttttctgcatctattgacatacttttgtgctttctgtcttcagttcttattatgtgatgaatcacatttattaattcatgtgtgatttttttttttctttgagatggagtctcactctcttgcctaggctggagtgcagtggcgcgatctcagctcactgcaacgtctgcctcccgggttcaagcaattctcctgccttagcctcccaagcagctgaattacaggtgcttgctaccacgctcggctaatttttgtatttttagtagagacagggtttcaccatgttggccaggctggtctcgaactcctgaccttgggtgatctgcctgctttggcttcccaaagtgctgggattacaggcgtgagccaccacgccccacctcatatatgttgaattagccttgcatccccaaaataaactctacttgattatagttggttaggtttttgatgtcctgctcaatttggtttgccaatattttgttgagaatttttgcatcaatgttcatcaagaatattggtctaaagttttcttcttttgttttatctctgtcaggttttggtatcagaatggtgctgtttttagttttttggaatagtttcagtagaagtggtaccagctgtcctttgtccatctactagaattcagctgtgaatctatctggtcctagcctattttggttggtaggctatttattactaattcagttttcaagcttgttatttatctattaagggctttgatttattttttgttcagtcttgagaggatatatttattcaagaatttttccatttcttctagattttcaagtttgtgtgcatagaggtgttcatagtagacttcaatatatttttgtggggtcagtggtaatgtctcttttgtcatatttaattgtgtttatttggatcttttcctttttcttcattaatcttaatggtggttggttttatttttatgtttttaaaaattttactcctgtacttgttgatcttttgtatagtttttcatgtcaaaatcttccattcagaaatgattttggttatttcttctgctagcttaggggttgatttgctcttgcttctctcagtgttttatttatgatgtcaggttgttaaactgaagtctttctaacttttcaatgtaagcatttaatgctataatttttttctcctaacactgccttagctgtgttgcaaaaattcaggtatgttgtatctttgttctcatttttttcagagaacttcttggttcctgccttaatttcattatttacccaaaagtaattcaagtgcaggttgtttaatttgcatgtacttgtatgattcaagtgattttctttgtattgaattacatttttatcaagctgtggcctctgtgtgtggttcatataattttggaatttttaaatttgctgaggattgttttgcttctgactgtgtggtcaattttagagtatgtgccacgtgatgatgagaagactgtatactatgttgtttttagatggagagttctgtagaaatctattaggactgtttagtcaagtgttgagtttaggtcttaatatctttgttaattttctgcctcaataatgtgactattagtgcccacgggtgttgtagtctcccactattattgtgtcagtatctcattctcttcataggtctctaacaacttgatttatttatgtgcccccatcaatttatttacttatttattttttattttttgagacggagtcttgctctgttgcccaggctggagtgcagtggggcgatctcggctcactgcaagctccgcctcccgggttcacgccattctcctgcctcagcctcccgagtagctaggactacaggcgcctgccaccatgcccggctaattttttgtgtttttagtacagacggggtttcaccatgttagccaggatggtctcgatctcctgacctcgtcatccgcccgcctcagcctgccaaagtgctaggattacaggcgtgagccagcgcgcccggccacgcccccatcagtttattataacatctttctctcttctgcttttttaccataaacattctttcacattcacaatccagatgtcccagagttcaagaacgtgtccagtgacctggttgttttaggagaaaatgtaaattaaaaataagaggctttatttacatacgtgaaaataagggaggatattttgttcatctctgttttattaaagcatttagattatatgtaggtatttttctctgcttttttgaaatatacataaattatattaacagctaaataaaccttttgtctttttttttttttttttttttttgagatggagtctcgcactgttgcccaggctggagtgcaatggcatgatcttggctcactgcaagctctgcctcccgggttcacgccattctgctgcctcagcctcctgcgtagctgggactataggcacccaccaccacgcccggctaattttttatacttttagtagagacggggtttcaccatgttagccaggatggtctccatctcctgacctcgtgatccacctgccttggcctcctaaagtgctgggagtacaggcgtaagcgaccgcgcacggccttgtcattctttttgactcaggattgtctttatttgtaacctgagattcattgctttgtgtttgctttggcagaggtttatttttttaattttcagtcattaaaagtacacacagatttattcagagtaaagctcattttaagagcacttgaaagttggacacaaaggtagaattaaatttagcaatacagaatgataaagactaaaagatacagagttaagttcctttgacagaaacttgattatccaaggtacttatttgcaggctgaagtacttacaatgcaaaagcaaggtctggccgtggtggctcactcctgtaatcccagtgctttgggaggccgaggcgggctgatcatttgaggtcaggagtttgagaccagcctgaccaacatagtgaaatctgtctctactaaaaatacaacaacaacaacaaaattagccaggcatggtggcgcatgcctgtagttccagctacttgggaggctgaggcaggagaatcgcttgaacctgggaggcagaggttgcagtaagcgcacatcttgtcactgcactccagcctgggcaacagagtgagactctatcctcaaaaaaataaaaataaaaaaaataaataagtgcagactcagtcggatattgctgctttctgttttctctgtaaactttaaaaagccaacaaagattatgatactttaagatggagattagttgtcttcaatttgttccagaagtaattgtgttgtgacaagagtgccaagtataagggactctgtgctgtgcctgctttctctaactaatgctaataatgagcctagggggagcatcatcagcattgacaggggacttatttaaaacacccattcatggacctttccatacctgcagaatcacattacatagattgagaccaacattaccaagtgatttataagctcaataaaacttgagaggcaatgcttagttcagtggttgtaagcccaggctgctaattacaatcacatggccagtttgcagaactccctttactggtgcccttcccacaggttctgtttaatgttctgggtggaagcattcatgttattttaattaactgcctcatgtgactctaagttgtggccagaatcaagtatagggggttcaagatacatttatgagagttaagtttcacctgtgcactaaagggtagtcctagagcctcttttctttgggtttcatagggacagggcagtgtggctcatacttttgttactgtagcagaaattgctggcaggggagggcacctgaagacaggaaaggagaaacttgtatttttatatctgtagagcagctcattgttgctgaatctcttctgttataaagtacagaaatgggtggagttttttctgttttgggtcttctgcctgtgggtgtggtggtagcaggtaaacatgtggtgctgacacttttcaaggcatagtctcaagatgcggtgtaatttgtccagagaatcttatctgagaaggaatcctagaaaagaaggagaaagagaaaaaatggcattcttaatgatgaaatattgaatacttattttatttttattttactttaagttccaggatacatgtgcagaatgtgcaggtttattacataggtatatgtgtgccacagtggtttgctgcacgtattgacccatcttctaggtgccctccccttgccccccactccacaacaggccctggtgtgtgttattcccctccctgtgtccttgtgttctcattgttcaactaccacttatgagtgagaacatgcggtttttggttttctatccctgtgttagtttgctgaggatgatgacttccagcttaatccatgttcctacaaaggacatgatctcatttctttgtatggctgcatagtattccatggtgtgtatgtaccacattttatctatccattctgtcattgatgggcatttgggttgtttccatgtctttgctgttgtaaatagtgctgcagtaaacatacgtgtgcatgtgtctttataatagaatgatttgtattcctttgagtatataaccagtaatgggattgctgggtcaaatggtatttctggttctagatccttgaggaatcaccacactgtcttcgacgatggttgaactaatacacattctcaccaacagtgtaaaagcattcctatttcttcacagcctcaccagcatctattgtttctgactttttaataatcaccattctgactggtgtgagatggtatctcattgtggttttgatttgtatttctctaatgatcagtgatgttgagcttcttttcatgtgtgttggctgcataaatgccttctgagaagtgtttgttcatcttttgcccactttttttttttgagatggagtcttgctctgtctcccaggctggagtacagtggcacgatctctgctcactgaagcctacacctcctgggttcaagtgattctcctgccccagcctcccgagaacctgggactacagatacccaccaccacgcccagctaatttttgtatttttagtagagatggggtttcaccatattggccaggctggtctcgaactccatacctcaaacgatccacccaccttggcctcccaaagtgctgggagtacaggcatgagccactacacccagcctttgctcactttttgatggaattgttttttttcttgtaaatttttaaaagtttcttgtaaattctgaatattagatctttgtcagatgggtagattgtaaaatttttctcctattctgtaggttgcctgttcactctgctgatagtttccttttctgtgcagaagctctttagtttaattagctcttatttgtcaattttgggtttagttgcagttacttttggcatttttgtcatgaagtctttgccgatgcctatgtcctgaatggtattgcctagattttcttctagggtttttatggttttgagttttacatttaagtctttaatccatcttgagtaaatttttgtataaggtgtaaggaagaggtccagtttcagttttctgcatatggctagccagttttctcaggaccatttattgaatagaaaatcctttccccattgcttgtttttgtcaggtttgttgaatatcagatggttgtagacgtgtggtgttatttctgaggtttcttttctgttccattggtctatatgtctgtttttggaccagtaccatgttgttttgcttactgtagtcttgtagtatagcttgaagtcaggtagtgtgatgcctctatctttgttctttttgcttaggattgtcttggctatatgggctcttttttggttccatatgaaatttaaagtctttttttctaattctgtgaagaatgtgaatggtagtttgatgggaataacattgagcccataaattactttgggcagtatggccattttcatgatgttgattccttctatccataaggatgggatgtttttccatttgattgtgtgctctcttacctccttgaggagtggtttgtagttctccttgaagaggtccttcacattccttgttagctgtatttttagatattttattctttttgtagcagttgtgaagtttatttatgatttggctctctgattgtctgttgttggcttataggaatgcctgtgatttttgcacattcattttgtatcctgagactttgctgaagttacttatcagcttaaggagtttttgggctgagatgatggaattttctaaatatagaataacgtcatgtgaaaacagagagaatttgacttcctcttactctatttgaatactctttatttctttctctttcctgattgccctggccataacttctaatactatattcaataggaatggtgagaaaggacatccttgtcttgtactggttttcaaagagaatgcttccagctttttcccattcaatatgatattggctgtgggtttgtcataaacagctcctattattttgagatatgttccattaacacctaatttattgagagttcttaacatgaaagaaagttgaattttatcaaaggccatttctgcatctattgagataatcatgtgatttttgtctttagttctgtttatgtcatgaattatgtttattgatttgcatatgttgaaccagccctgaatcccagggatgaagccgacttgatcatggtgaataagtttttgtttttgtttttgcttttttgagaccgagtttctctcttgttgcccagtgcaatggtgtaatctcggctcaccgcaacctccgcctcctgggttcaagtgattctcctgcctcagcctcttgagtagctgagattacaggtatgcaccaccacgcccggctaattttttgtacttttagtagagacgaagtttctccatgttggtcaggctgggctcaaactcctgacctcaggtgatctgcctgcctcggcctcccaaagtggtgggatttcgggtgtgagccactgcgcccggcctggtggatgttttttgatgtgctgctggattcagtttgccagtttttttttgtttgtttgtttgttgttgttttttttttttttaggcagagtttcattcttgttgcccaggctggagtgtaattgtgcagtcctggctcactgcaacctccgcctcctgggttcaagtgattgtcctgccccagcatcccaagtagcctggattacaggtgcccgccactacacccagttaatttttttttttaatttttattagagatggggtttcaccatgttggccaggctggtctcgaactcctaacctcaggtgatcccccccaatctcggcctcccaaagtgctgggattacaggggtgagccaccacgcctggccctattttgttaattttttcaaaaaacagctcctggattcattgatttttttttgagggtttttcatgtctatctccttcagttctgctctcatcttagctatttcttgtcctctgctagcttttggaattggatttgtttgctcttgctttctagctcttttagttttttttttttttttttttgagatggagactcactctgtcacccaagctggagtccagtggcgtgatcttggcttactgcaacctccgcctcctgggttcaagcaattctctctgcctcaacctcctgagtagctgggattataggtgcccaccaccacacctggctaattttgctattttttagtagagatggggttttgacatattggccagaggctggtcttgctctcctgatttcaggtgatttgcctgcctcggcctcccaaaatgctgggattacaggcgtgagtcaccgttccccgacttagctcttttaattgtgatgttagggtgtcgatttgagatttttctagctttcttatgtgggcatttggtgctataaattccccttttaactctgtcccagagattctagtatgttgtgattttgttctcactggtttcaaagaacttttgatttctgccttattatttacccaggagtcattcaggagcagattgttcattttttatgtaaatgtgtgcttttgagtaagtttcctaatcccgagttctaatttgactgtgttgtggtctgagagactgtttgttaccatttcagtcctgttgcattggctgaggagagttttacttccaattatgtggttgattttagaaaagtgccatgtggcactgagaagaatgtatattctgttgatttggggtggtgagttctgtagatgcctattaggtccacttgatccagagctgagttcaagtcctgaatatcctagttaattttttgtcttgttgatccgtctaatattgacagtgaggtgttaaagtctcccactgattgtgtgggcgtctaagtctctttgtaggtctctaagaacttgcttcatgagtctgagttctcctgcattgggtgcttatgtatttaggagagttagctcttcttgttgaattgactcctttaccattaaataatgcccttctttgtcttttttaaatctttgttggtttaaagtctgttttgtcagagactaggattccatcccctgcttatttctgctttccatttgcttggtaaattttgcttcatccctatgtgtgtctttacacatgagatgggtctcctgaatacagcacactgatgggtcttgactctttatccaatttgccagtctgtgtcttttaatttgggcatttagcccatttacatttaaggttagtattgttctgtgtgaagttgatcctgtcatcatgatggcatctggttattttgcacactagttgatgctgtttcttcatagtgtcattggtcttcatggtgtgtttttgcagtggctggtaccagtttttcttttccatatttagtgctttcttcaggagctcttgcaagccaggcctggtggagacaaaatccctcagcatttgcttgtctggaaaggattttatttctttttctactcatgcagcttagtttggctcgatataaaattctgggttcaaaattcttttctttaagaatgttgaatattggcctccattgtcatctggtttgtaggatttctgctgagaggtccactgttagtctgatggacttattttgtaggtgacctggcctttctgtctgactacccttaacatttttttgtcatttcaaccttggagaatctgatgattatgtttcttggggttgatcttcttgtggaatatcttagtggtgttcttggtatttcctgaatttgaatgttagcttgtcttgctaaactggggaagttctcctggatgatatcctgaagtgtgttttccagcttgtttccattctccccctttccttcaggtattccagtcaattgtaggtttggcctttttatgtagtcccatatttctcggaggctttgttcattcttgttcattcttgttcagtctttttttctctaatcttgtctgcatgccttatttcagcaaggtggtctgcaaactctgatattttttcttctactttgtcaatttggctgttgatacttgtgtatgcttcatgaagttctcatgctgtgtttcttagctccgtcaggtcatttatgttcctctctaaactggttattctagttagtggctcctctcgctaactttttatcaaggttcttaggttttttgcatttggttagaacatgctcctttagctcagtggagtttgttattgcccatcttctgaagcctacatctgtcaatttgtctatctcattctccatccagttctgcacccttgctggagaggcattgcaatcatttggagaagaagaggcacccttgccttttgggttctcagtgtttttgtcattgattctcatcttcatgagtttgtctagtttcgatctttgatggggttcttgtggggacttttttgttgctgttgttcatttctgtttgtttttctttcaatggtcagatccctcttctgtatggttgctgtggtttgctgggggttcacttcaggccctatttatctggttcacttctgaacctggagatattaaggagattggagaacagcaaagatgggtgcctgctccttcctctgggatctctgaccttaaggaacaccaatctgatgccagtaggaacacagctgtatagggtgtctgacaaccccagttggagtatctcacccagttgggtggcatgaggaacagaacccatttaatgaagcacttttattgtcccttggtggagggggtatgcttcactggggttaaactcactcctctgggctgcttggattcctcagaactggcggggggaaaagctaagtccactggtccacagaaactgcagtcacctctccccctagggactcaggcccagggagatcagagttctgtccctgagcccctggctggagttgttggagttcctgcagagtggccccacacagtgaggagggatgtgtcagggtcaggcctgaagaggagctgtagctgcagtctggcacagccagtgtgttaggctgtgggggacacctcttgggaccaagccgtccagcatccctggctccagcaggggaaaagcatggccaggagctatagagatgactgccgcccttcccctgcccagggagcctagtgtgttaggcagctgtcagtcccagtgctggttgctgcccctcccccagggagctcaaatggcttaaacagcaggcagccatagctgtagtgctggtcacccctcccctgggaactcagcaggcttaagcagattttagctgagaggctgttgagaatctgcacagctctggggttgggatcctaggccccagtggcatgggttcacgagtgaaatctttcagtctatgggttgcacaattccatggaaaaggcatggttttgtcggctaagtagcacattcattcaccgcctcccttggctggggggtgggggctcccctgccccgtgtggctctcaggtgggttgctgcaccacactgctctttcttcctctctgtgggtcatgccagctgcctagtcagttctgatgagagaacctggatacctcaggtgccagtgcaggattcacaggccattatggttcttttcggtgggagtctctgatcaccgctgcttctagttggccatctttgccctgcccctaaaaaatggcttttttttctttttaagctaaacatgtctcagatgaagaactgtgtccactctgcctcctggaatgccatgtgttcagtacttgcaaagctttacttttctacttgtgctttttcttcctaatgagtttaactactttttagttcttataatagtcaaaggtctctgaaaaatatttctttcctacataccagagtcttctctacattctcaacatcatggcttcttacatgtcatcaagaattctcaccatgaatttatgaactgcaatattaagaatgtttccttcgtggctatggaacatgggaaggtgtagatactcaagattcctattggggaaaagctggggtccttaataaagatggagagcatgtaattttgaggttccatctctgttctccattagctgtaaacaaataagattaagaaaatgcttatttaaatgggatggcatttattacgcagaaagtttaaaaataataataattaggagatacttgctctttagggtgtgaaagaaagactacttaaaatcactattaaaatttacagaacatggcagatattggtatctggaactttacataaaaccagtgtttctttatgattaaattcagactataatttacttttggctgggcaatatcatagcagtgatgccgtgtccttctgtgtgcatcagcacatttgtcttcatgcacttgatgttaataactcacttgattaatgaactctgtgacagatttttttctatagagttaattatttttctcttcattactgagtatctttattcagcagatgtgcataaacaatcacatttaatctggcagctgacctttcttaggctttttttttttttttttgagacggagtctcgctctgtcgcccaggccggactgcggactgcagtggcgcaatctcggctcactgcaagctccgcttcccgggttcacgccattctcctgcctcagactcccgagtagctgggactacaggcgcccgccaccttaggttttctttgcatttatctgtctttggaaaatgaaagctctcatctttgtttacaggccagaaaaactgaaaaacacacaggcttttccacttactggatgtttgacaaaatagttttcttggaccaaaaacatgggcattactggtgagcttgttagagattcagaaactcagattttattccaaattttcttttcttttttttttttttgagacggagtctcgctctgtcacccaggctggagtgcagtggcgcgatttcagctcactgcaagctccgcctctggggttcatgccattctcctgcctcagcctcccgagtagctgggactacgggctctcgcctccacgcccggctaattttttgtatttttagtagagacagggtttcaccgtgttagccaggatagtctcggtctcctgacctcgtgatccacccgccttagcctcccaaagtgctgggattacaggcgtgagccatcgctcccagcccagattttctgaaaaaataatctgcattaacaagatctccagtttattgtacacattaacatgtgagcagtattttctaactgaatatgtcttttccatctgaaaaatttacacaacttattctgtatgatgtaaatgtagcactcaaaaatgtacatgttagtgttaatgccctcaattttatacttcatcatccgaagaagtatcatacttacctcgatgttgtggatcttatgccactctcttttctcagagttagagaatgcattagagaatatacttctgtgctgaaagttatttattaaatatatcagtcactcctataagtaagaaccagttctctttactcttgttttaccttgagtcaaattaaaaattctgttcatggccacttggtaaatatgtatgtgtgtttgtatgtttttcagggagtgttgacatttagggatgtggccatagaattctctctggaggagtggcaatgcctggacaccgcacagcagaatttatataggaatgtgatgttagagaactacagaaacctggtcttcgtgggtgaggataacttcaatatacaattccctaatataccctataaattttatttctcttttttgtagaatggtttttggtaatttatgctttcagatctctgttttttgtttttaacttcaagatttgtctatgtagaaaagaatttcaagatgtttcattttgacctgaactttccacactcctgagctgatctgtgttcttcactctagattagtgttaattttagaaatttagtggcataacgtactgttgcccacatcttaaaatctaattgccactaccagtttttgatttagtagtatcaggtagtgaaattaagaacttacaaaattaaaatatttcctaaatatttaaaattttttgttgtgtattagtattttggaatcaatttactagaatattctattacatccttttttctgaacacactactaaattggtaattggagaatatgagcaagattcatgttatttgtaataaaacaggtattgctgcctctaagccagacctgatcacctgtctggagcaaggaaaagaaccttggaatgtgaagagacatgagatggtagctgaacccccaggtaggtgagagtgaaagtgaatacaacagatgacacagatgagagctccaaagtagaaaaaaaaaaaagccagtccttaaaatgatttgaaatctgtgttccaaaggaaatagtttctgggaagcctgaattttttaaattttgctttcacatagaagcatcttctgtcttatatttttaaaatctctgaagattttactttccctttggtgatcttcttcaagtttacagtgacagccaagacagccctcttcatggcacataagagactgtgaaatctgactttttcactgtttttgaaaacacgtagataatctgcataattttgagaaactctatgttaaactgtttttcaagttctgtttttacattatgtcctaaatgtgtgagagcagtggtttctgttccattggtttctttattgctaatttttctgcacattgcattctgtcttattatagtcttgaagtatagtttgaaattataaagtatgatgttcttctgctttgtcctttttttttcaagattgctttggctattcaaagtttattgtaagtctatgtgagaattgtattttctttttctctttcttttttttttttttgagatagagtctcgctctgtcacccaggctggagtgcagtgtcatcatctcggctaactgcaacctctgcctcctgggttcaagcgattcttctgcctcagcctcctgagtagctgggaatacaggcgcgagccaccatgcctgactaatttttgtatttttagtagagatggggtgtcaccatattggccaggctggtctcgaactcctagacctcgtgatccgcccacctcggcctcccagagtgctagaattacaggcgtgacccaccgtgcctgactgagaattgtattttctattgctgtaaaaaaaaaatactggaattttgatagagaatttattgaatctagagagcactgtagataacacggcactttaataatattctttcagccgggcatggtggctcacgcctgtaatccctgcactttgggaggccgaggcaggcggatcacctgaggtcaggagtttgagaccagcctggccaacatgatgaaaccctgtctctactaaaaatacaaaaaattagtcaggcgtggtgacaggcgcctgtaattccagctacttgggaggctgaggcggaagaatcgcttgaacctggtaggcagaggttgcagtgagctgagattgcaccactacactccaatgtgggcaacaagagtgaaactccatctcaaaaaaaaaaaaattctttcaatcaatagacatgaaatgtttttaaatttatttttgtcttctccaatttttttttattgatgtatcttttatttgaaagatatttaagctccttggttaaatttgttctcagaaatttattattttagtgctattgtaaataagattgctttctgtctcttttttgtcagatagtttgtttaaagtgtatggaaccataacttacacttgtatgttaattttctattttgctaaattattgagtgtaattattactttaattaggttttaaatgtactgtttatggttttctatatacaagatcaaatgatctacaaaaagcaactttttacttatttgtcttcaatttcagtgacttaatttttttttttttttttttacttattccacatacttccagtgctgtgttaaaatagaagcgttgagaatgggcataataaacttttgcattggtgtctgtgagtttgaaggagcaaacacctcttcaagtttttcttgttgttttttttttttttttttttttttttgagacagcgtctcactctgtcgctgagactggagtgcagtggcgcggcctcggctcactgcaacctccacctcccaggttcaagtgattctcctgcctctgcctcccgagtagctgggactacaggtgcgtgccaccatgcctggctaatttttatatttttagtagagatggggtttcaccatgttggccaggctggtcttgaactcctgacctggtgatccacccgccttggcctcccaaagttctgggattacaggcatgagccaccgcgcctggccctcttcaagtttttataaattggtttcagaaagtgaagatcttttgttgagcccccagggtgatgggatgtcctatgggtttgtagtggagaggggtaggtagcttgtttacaaaggctgctgggtctgcattagggtccacctttagttggcttgttacaaggggcttaggtagttgtaattcccattttatttttggacagagtgagtatccttcaggactttgctctgtagggcagacgctagggcagatttctgcacttgggtctgcatatggtaggctttatattaggatgtagatgagtttggctttcactgaaaaccagagaggatttcccatggtcactgtgtgggtttctacataggcagaacttgccatgaactgtggctcagggtgataaaactgagtcatggaactgcttcagggaccacagtaagggccaaggtctgcaggcctgctgcatggctataaaggggtgtctgtctctaggcttctgaaagggcaagacctctcccagactgtggctgggaggagtttgggatgattgcagtgtaagttcagaattctcagtgggaccaagtttggtgggccattttctggtctgtagccaagaacaggggtcctatagtttgccacctgaatgaaagcctgccttctgaagagaatattcctcaatcttgggcattagcagagtttcacagctccctccgtagatctcaaagctctttaagggcacttattttggagatgggttcttgctacataacccaggttgatcttgaagttctgtcctaaagcatttctcattacaggtttgagtcatgattcctgtttctctcataaaggcatttttgtcaggctgatgaattttcttgctgtcagaaaataagcaaataaggcaccatttatttttccatcttagtgatgtcactcttcctgtccatttttactttctactttctatttcaattttgtcagtagttttagatttagacatttaggacaatatactaaaatttacatgttatgtctgaagtgaattaggtaattagtagacagacaaaaaggaaatatagacaggcaaaaaaagattacaggattttcactcacttttgtcagctagtacctaaaatatgacatgatttgttcccaaatatttgtttcatatatcagaggccctgaccatattctgcaaaatagatatattttttctttatttagcaatgtaaggctattttttgcttctaaatttggattacagcagttttattttgtgtaagaatagcatatatttaaaacttagaaatgatcttaaaatgcttatttatcagtttgtcattagagtcttctgtttatgattatactgcattttatctgaaacttttactgcattacagtgcatgccaatgattcaaaatagccaccttcaatgagtacacagttacagtaaaatattacagttatctacacaaattctttgttaatgctacatcaagttacataccagattttatgagtaaacatttattattattttttagtttcatattaacgcattttttcagtgtaggtttcttaacataagtttattgtgttttttggttttacaattttagacaatttgcaattctgtttttacatgtaagtcggtgtgtggtttaagagatagatcagccttatctctattacaatctgattatatgtgtgtgtgtttttatctataaatatgaccccaattttggttatggctaatcttgtatatattttttcttggctgatttttaatggtggctttatcttgtctaaatgagtagtcatggaaatagtcttattttcaccttgtgtttaataataaacatatttcctatgtgtgagggaaacacttttgtgacttgacggtaatttttggaaagatttataattctggatcttcttcagttattcttctaaaaaacaattgtataaacatataacctaaaatttaccaccttaaatctatttaaatgtacatttcatggccagtcatggtggtggttcacgtctgtaatccccggattttgggaggccaaggcaggaagactgagcccaaaagcttgagaacatcctggaagacatatggaaacctcatctctgtaaagcattttaaaacttagccagacatggtgaagtggtcctgtctccttgggagattgaggagggaggattacttgaacctggaagtttgaggctgcagtgagctgtaattgtgccatgcaccccagcttgggtgacagagtgagaccctgactcaaaaacactgtacatttcaggcatgttaagtatatttacattattttataaaagatttctagaaattttacaatacacattaaacaactaccaatttttcccatttcctggcacttttcaaataccgttctgttttctgtttctaagagtataactgctttatatatctcataaaatctgtttgtggctggctcattttattttgcataaagtcatcaagatttacctttatagttgttagaatatttcctgctttttttcaaactgagtaatatattggcatttttgtatttcaaattatatctgctgaacgatttggtgaccgaaatttgccttgcttttacctactggcttttagtaacaatgctaaaataaatgtgggtatgcaaatgactcttcatgtgaccatatatgtgagagtttatatatgtgctgcattctattttattagtctactttttcacctttatagtcataccaaattgttttaattctgtagctttgtgttttgaaatcaggaactgtaatgcctccaacattgttttgttttgtttttaatatttttgggtactttattgtatgtagagattctgtatactcgagggattgctgtttctgtttcttcaaaaatgcagtgagaaatttgaaaaacattgcattaaatctgtagattgcattgagcaggatggacatctttacagtattacctttttcagcctttcacaagagcatgctcaagagtgtgttgtttaatttctatatatttgttaatttttcagattttttttctcgttgtatactcatttcattttggtgatagaaagtaatttataaaatttcagttttaaaaaaactggtaagacttaattttcttctttttgtaataagaggaggtctatcaaggaaaatgttgtattagctattgagaaccatgtgtgtcctggtgttgaggggtgttttctatacctctgttagaaataattgtcttacactgcctggaagtcctctattcccttactaatattctcatttaatttttattacggaaaatgcagtgtcaaaatatcctactataattatgttgctctctatgtgtctctgttattctgtcaatgtttgctttatatgtttggagccctaatgtgagatacacacacacacacacacacacacacacacagagagagagagagacgtgtatacagatttgtcataggttcccagtgagtaaatctgaagtggtttttttttgttgttttttttttttttttgagacagagtctcactctgtgtcccaggctggagtgcagtggtgtgatctcggctcactgcaacctctgcctcctaggttcaagcgattctcctgcctcagcctcccgagtagctaggattacaggtgcccaccaccatgcccggctaatttttgtatttttagtagagtcagggtttcaccatgttggccaggccagtctcgaactcttgacctcaagtgatccacctgcctcaacctcccaaagtgctgggattacaggcgtgagccaccatgcccagcctaaatctgtaagttttaatgtccttttttgtctccttggagttttaacttcaagtacattttgtaaaatatgatagtttttgacttaagatgtagcttgcataatactatcttgatttcttctgctctcatttgattaatatttgcatgaaatgtattcttccatcttgccccttttagtgttttttatcattagatctctactgactcttgtagaaaaaaaagttggatcttggtttttaaaatttttaatctgttgaaagtatgtctcgatttgaaagttaattttatatatacatttaaataattgataaagacggactgttacatttttaattattttatttgattcttgcatctttgtttctcattttctctctttgtgtctttttgatttttgtattgatatgcttttacttatttctaattcacttttgtatatttgtacagatttttttttttggtggcaccttgggggttgcataaaacttctataagaaacaacagtatagttttaatttggtataaaataaatctcagttgaataaaaaaatcttcctcattacatctgccctgaaatttgtctttgatgttgctaattatgtttttacattgtatattcattaacagttgtttataatttctgtgcttttatttttcaaaatttagagatcatttaaaatgttttctgcaccattatgataatgccacaagattctgtttttatgtatgtgcatatctttcctggaaaataatgtatttttatatgattatgtgtttttttttttaatacttttactttcagtttaaggaactgctttcatcatcttttatatgtagggcatatgcagtgctaatatactttttcagaatttggttgttttggaaggttttttctttttatgtggcaggacagatttgttgatggtattatcctcaacttgatagctttttttttttttttcccctcaggactttgtgtcacacggtatctttctgatctgcagaatttttgttgataattcactggtaatatcataagactatgtttgtaaatgacacattacttttaccttgtagctcctaagactttcttcttgtctttgatttttgaaaatgtgcttaatatgtatctgtttaaatatctgtgtgtgtatcctaatttgtttgttgaacttcatttttacatcatttttcttttaggattttccagttgtttatttttctactttttaccaccaaattgttttttttaatattttgatattcttgtatttattctcatttttgtgactttctacagtggactgtgttcctgtttcactcattggatattattcaacttatgagtgtttaaaatgtgtacatcttttttatggtttctttctgaagtttatacggtatttttgatgaaattatattgccctgttttgtatacattgtaatcttggaatgagatttggacatcaaaaaaagctacctgtcacagtctttaaaatgtgtttttttctgacatagtctgaaaacaattatcttggctagagattctgggagtctctcaaacatgttcttaggatctgccttgtctaaaattttgtgtttagtttttagtcagaggagtttatttgtgtttctcttcttttttttttgaaacagagttttgctcctgtcacccaggctgcagtgcaatggcatggtctcagcccactgcagcctccacttctctggttcaagtgattatctggtctcagcttcccacttagctgggattacaggcatgtgaccccatgctcagctacttttgtatttttagtagagacagggtttcactatgttgcccaggcttggtctcaaactcctgacctcagctgatcctcccaccttggccgccaaagtgctaggattacaggtttgaaccaccaaactccttcttaataaccaataatcacttgctataattgtttcctgtctgtagtaccacagtctttctgctgctgtaaaacttacctttcttatttatttatttcattatactttaagtcctagggtacatgtgcccagcgtgcagttatattacataggtatacatgtgccatgggttaatgctatccttcccccagcccctcataccccgacaggccctgttgtgtgatgttccccgccctgtgtccaggtattctcattgctcaattcccacctatgagtgagaacatgtggtgtttggttttctgtccttgtgatagtgtgctcagaatgatggtttccagcttcatccatgtccctgcaaaggacatgaactcatcctttttcatgaatgcatagtattctgtagtgtatacatgccacattttcttaatccattctatcattgatggacatttgggttggttccaagtctttgctattgtgaatagtgccgcaataaatatacgtgtgcatgtgtccttatagtagcatgatttataatcctttgggtatatacccagtaatgggatggctggctcaaatggtatttctagttctagatccttgaggaatcataacactgtcttccacaatggttgaactagtttacagtcccaccaacagtgtaaaagcgtttctatttctccacatcctctccagcacctgttgtctcctgactttttaatgatcaccattctaactggcatgagatggtatctcattgtggttttgatttgcatttctcggatggccagtgatgatgagcatttttccatgtgtctgttggctgcataaatgtcttcttttgagaagtgtctgttcacatcctttgctcactttttgatggggttgttagtttttttcttgtaaatttgtttaagttctttgtagattctggatgtttgccctttgtcagatgggtagattgcatagattttctcccattctgtaggttgcctgttcattctggtggtagtttcttttgccgtgcagaagctctttagtttaattagatcccatttgtcaattttggcttttgttgccattgcttttggtgttttagtcatgaagtccttgcccatacctatgtcctgaatggtattgcctaggttttcctctagggtttttatggttttaggtctaatatttaagtctttaatccatcttgaattaatttttgtataaggtgtaaggaagggatccagtttcagctttctacatatggctagccagttttcccagtaccatttattaaatagggaatcctttccccatttcttgtgttttgtcaggtttgtcaaagatcagatagttgtagatgtgtggtgttatttctgaggtctctattctgttccattggtctatatatctgttttggtaccttacctttcatctcagcagcctcaaactgtcatttgaaagaataccactatttctttcagaacttttatgcaatgagacacaggaaccagtgtaaaagcccctgccattgagaaataaagatgtataagccattattttacttgtcttttaaaaatgaaaccaggagttggcaatttatttctaaagtcactatgttatatagggaagcaggaagatctgcactgggtaaatgtaacagacttttctttcttctatgtgactctttgcattgggctcacctggggcactgcacacacttaacttactttaatttttcagaaatgtaatttgttctgtatgcttttatatgtctgtgaaaatgttagagcgtgtaatattttgctgtaacatcttgtgatgtagtttgtataattttataggttagatttgtaaagtacattcgtctgagtcagtaagtgaagtaatttattatttttatttctttcagttgtatgttcttattttgcccgagacctttggccaaagcagggcaaaaaaaattatttccaaaaagtgatactgagaagatataaaaaatgtggatgtgaaaatttacagttaagaaaatactgtaaaagcatggatgagtgtaaggtgcacaaagaatgttacaatggacttaaccagtgtttgacgactacccagaacaaaatatttcaatgtgacaaatatgtgaaagtctttcataaattttcaaattcaaacagacatacgataagacatactggaaagaaatctttcaaatgtaaagaatgtgaaaagtcattttgcatgctttcacacttagctcaacataaaagaattcatagtggagagaaaccctacaaatgtaaagaatgtgggaaagcctataatgagacctcaaacctttctacacataaaagaattcatactggaaagaaaccctacaaatgcgaagagtgtggaaaagcctttaaccggctctcacaccttactacacataagataattcatactggaaagaaaccctacaaatgtgaggagtgtggcaaagcttttaaccaatctgcaaaccttactacacataagagaattcatactggagagaaaccctacaaatgtgaagaatgtggcagagcttttagccagtcctcaacccttactgcacataagataattcatgctggagagaaaccttacaaatgtgaagaatgtggcaaagcttttagccagtcctcaacccttactacacataagataattcatactggagagaaattctacaaatgtgaagaatgtggtaaggcctttagccagttatcccaccttactacacataagagaattcattctggagagaaaccctacaagtgtgaagaatgtggcaaagcttttaaacaatcctcaacccttactacacataagagaattcatgctggagagaaattctacaaatgtgaagtatgtagcaaagcctttagccggttctcacaccttactacacataagagaattcatactggagagaagccctacaaatgtgaagaatgtggcaaagcttttaacctatcgtcacaacttactacacataagataattcatactggagagaaaccctacaaatgtgaagaatgtggcaaagcttttaaccagtcctcaactctttctaaacataaggtaattcatactggagagaagccctacaaatatgaagaatgtggcaaagcttttaaccagtcctcacaccttactacacataagatgattcatactggagagaaaccctacaagtgtgaagaatgtggcaaagcctttaacaactcctctattcttaacagacataagatgattcatactggagagaaactctacaaacctgaaagttgtaacaatgcttgtgacaacattgcaaagatttccaaatataaaagaaattgtgctggtgagaaataatagaaatatgaatgtgacaaagcctttaaatggttatcacactggattgtaggtaaggtaattcattctggagaaaacttctacaagtgtgaatgaacagtgtggcaaaacttacacaatgctcaaaccttattgcacaggaaagcctttatacttgagaacaaatgtacaaatataaagaaagtaaaaaagtgattaatatctgtgcacatcttattcaacatcagagtttatattaatagcattaaaagtgcaattactgtcaaaagagttcaaaaaataagcatttaaagtgctgaagaggatttattttgaagacaaacattacaaatataaacgaagttgtggtaactttacttgtaacacagatcttgttgtattcattctgtattagagcaaaccctgaggcaattgctcaaactttgttcaacatcagagaatttatatcgaagaaaaaccctgtaaatgtaataaatttagaaaaaaacatttattcaaaaactacaggttagaaaattccagagagttcatattaaaatatttttgcatatacagtaaatagaaaaaaatatttaattcaatggtaagtttatgtaaatatcagagaatttatgttagaaatatataaggcaatgacacttcagactttacactgaatcagagttctgagtttagaaagtaatccaaaactaaacttggcagaaaaattatttgtttataactttaaaagagtagaagattttttggagagttacaagtatacttttttttagaaagattacagattttttttaaaagtaaataactctcaaattacttcatacaaataatgttgtaattaactcaaattacttcgtgttaatgttgtaattaactctcaaattacttcatgctaaggaaattagtttttctttttcttcttctttttttttttttttttagatggagtcttgctctatcgcccccccaggctggagtacagtggcacgatctcagctcactgcaacctccgtctccagggttcaagtgattctcctgcctcagcctcccaagtggctgggattacaggcgcaaaccaccatgcgtggctaaattttgtatttttaatagagccagggttttgccatgttggccaggctggtctcgaactcgagactttaggtgatccgcccagcttggcctcccgcaatgctgcaattacaggtgttagccactgcgcctgcctgatgttgtttctttattcctattgtattcatatgtgaaagcatgtgaccaaaagatatgaggattattttttattaggtgagcatttatgacctcttctatgaaagagtaaggacattaaaatgcatgatgaaaatctaagtaaagaggttctttgtgattcacttacagtactgagtgatgcatgaggtaggtgttctgagtaatattctgcattatattgagagacaaatttttagttttagttaaaattaaaaataaattagtatattattttactaattttacttttatgaaaatgcagtacatgttaaaaattttagattatgtgtgaacttaatttcttaattcaacatttttaacagtttaaatattgtgcattcaatcaagtcacattattccacttactttaacctagtccaccttactcaagggtgtaggtaaaaggtggtaacaaggccgggcacggtggctcacgcctgtaatcccagcactttgggaggcaaaggtgggtagatcacctgaggtcgggagttcaagaccagcctgaccaacatggagaaacgccatctctactaaaaatacaaaattagccaggcatggtggcgcatgcctgtaatcccagctactcgggaggctgaggcaggagaatcacttgaacccgggaagcagaggttgcggtgagccgagatcatgccatggcactccgtcctgggtgacaaagtgagactccctctcaaaaaataaataagtaaataaaataaatggtggtaacaatacactatttggtaaaagaatgcactaacatctgtagtactaatcttttttccagtggctttaaactgcaaataaggaatgttgtttctgtaggtaaaatttttatttattttttcccatttaaatttacttttgttagttttttcaggcatataatatttatgttatatatggcatattctgataagaggcatacaatatgtaataatcacattagggtaaatgaggtatccatcacctttagaatttattttttgtattatgaacagttcaattgtacagttttagtttttttaaaatatacgattgttattgactacagggttatttttataataaaaattatatacaagtataaaatttacacatttctgagtcctgaataaataaaaataatttcttgtatatttttctttgaatatgtggcctctctacttgcaaacagatacaggcttttagttttgatttacatagagttaaatgtacacatctattagtctaaatataaaccttaggtgtaagaagattatggattaagtgtgtttgagtatgagtttgtaactattttcagaataatattggaacaagacatcattttaataaggtgtctaattttcttttcttttttcttttttttttttttttggagacagaatctcactctgttgcctaggctggagtgcagtggcgtgacctccgctcactgtaactctgcctcctgggttcaagcagttctcctgtttcagcctccctagtaggtaggactacaggcgcaggccaccatgcccagataatttttgtatttttagtacagatggggtttcatcattttggtcaggctagtcttgaactcctgacctcaggtgatccacctgcctcaatcttccaaagtactaggattacaggcgtgaaccactacacctggtcaggtgtctacttttttagaaaacaaaaatcctcaaaaatgaatgcaaatctatactctggtttgtattgaattttactgtataattttacggcttatggttcagaatcttgccattcaaattctcttgttttcacttgtctggtactcatgctaggcccataaatttcttgtttctgatatatatttgttgttttatagtttatgaggtattcattttgtgagctgctctgtgattataagaatgattttaatgaaatttagttatgggctgggtgcagtggctcacacctataatcccaacactttgggaggccgaggtgggtggatcacttgaggtcaggagttcaagatcaacctggccaacatggtgaaacctcatctctaccaaaaataacaaaaattagccaggcatggtggcatgctcctgtaatcccagctactgggaggctgaggcaggagaatagctttaacccgggagacagaggtcacagtgagccaagattgtgccactgcactccagcgtgggcgacagagcaagactccacctcaaaataaaataaacttagtcatgtacacaaaataatttttagctgtaattctaaaattagtgcattaaattttatttagttggaacatttcatttaattggagaaccctatataagcctacttttcgtatgttattttttttcactttttgtgatggatataagtaaatttattcattaggcgatttgttcaggtaagtactagggaagcttcataagtcgagaatgtttttatacataaatgtagcaaacaaacatgacagtgcttgctgtataacagatgctccataataaggcataaatactcctgtgaaagttgcaaacttcaagtcaggtggaaaatatcaaaggtaaacaaataacattgattcttcatgtggaggggacattttattttttttcaggctgcaaagctgaattttgctgaatttaaaaagaaattctgcttcatttattttctaattatcttaagctttgtctttttatgtgtattccacccacgtatacatcatagcccttctttttctgtgttaatggctgcagttatcccactgtttttttcatgccatgtcatctcacatggtattttgtgggttttgatgagaactttggtattttttaatggactgaaaaaatggttttaactggagagtttgcttatcaatataactttcagatcagttaattaagataaaaggcatacatgtccacaggcgagaggattaaatcagttagtgttgtgctgctttctttgtaaaaagaaaaaatattgttagaaaaagagtcttactagattcttacccaaagtgtgacaaatacaaaatttcctagaaaatatagaaattagaattttagagagtttatggtaagtgaaccatattaaattattattttttaagacagagcctcactgtcacccaggctggagtacagtgtcacaatctgggctcactgcaacctacatcttccaggttcaagcagttctgcctcagcctcccaaatagcggggattgtaggcacccgccatcatgcctggctaatttttgtatttttgtagagacagagtttcaccatgttggccaggctggtctcaaaactcctcgtgatccgccagcctcagcctcccaaagtgctgggattacaggcatgagccaccgcgcccagcaaagaaaactaatttgtatgaaagaataaaagagcccaaatagtcaaggcaacgtcagaaaaaaaaaaaaaaaaaaaaccagaggcctcctattacctgatttaaaattgtactacaagctacagtaaccagtattacatggttctggtatgaaaatatacatttagatcaatggagaagagaaagccctgaaatctgcacttttacaaccaagttaattttcacaaagcccacagaaattaacaaagggaaaataactgcctatttaataagtgggggctggatgcagtggctcacacctgtaatcccagaactttgggaagctgaggctggtggatcacgagttccggagttcgaggccagcctggccaacagggtgaaaccctgtctactaaaaatacaaaaattatccaggcgaggtagcaggcacctgtagtcccagctactcgggaggctgaggcagaagaatcacttgaacctgggaggtggagattgcagtgagccaagatggcgccactgcactccaccctgggtgacagagtgagactttgtttcaaaagtaataataataataaatggtacagggaaaactggttatgtgcagaaaaaagtggactcctacctctttccatatagaaaatgcaagtcaagatagattaagaacttatctgtgagtcttcaagctacacaaatcctagaagaacatttagaaaggactgctgtagacactggcctctggaatgaatttatgaataacatcttaaaagtgcaacaacaataaaaatcaaaaatttgcatctaattaaactaaagagcttccgcacagccaaagaaactatcaacaaaggaaacataccttacaatgtgaaataaaatatttgcaaagtgcatacaactgattaatatatcgaatcttaagaaatttaatttgacaaagcagaaaatatcgacacttctcaaaggaagacgtaagagttgccaataaacattcaaaaaatgcttaacatctgtaatcatcagagatgtaaatcaaaatgacaatatgataccatttcacaccagttagaatggctgttatcataagtcaaaaaattacatgttgaagttgtggagaaacagctttctgtttcaacttcatcctgacttcaggagaaacgggtgcctataaatcttagattggataagaaaaatgaggtacttacagactgcaatactatgcagtcacagaaaagagtgaaataatgtcctttgtggcaacatgaatgcagcagaaggccattaatgtaagcaaattaacagagatcagtaaaacaaataccacatgttctcacttatatgtgggaggtaaacattggatgctcatggaaacaaagatgaaaacaataaacactgggaattccaaaaagatggaagaagaaagggagacaaacgctgaaaaactacttaccatgtgtagtgtacactgcttgggcaatgggatagttaaaagtgtccaaacttcaacaccatgcagtatacctatgctaccaatctgcaggtgtattccctgaatctaaaatagaaataacaagatgttttgtggtataatgaaatgttatatttctgtagttccaagttaatagttggaattagcagtgaaagaattatttactccttaaggcataggggtaaatgtttctatacccagtctccccacattttgtaagctatcttctctgaaagctcttggcctatagcccaagatgtcttttattcccaagtgtgcagttaaaatagatgactctggatttaagggaggttccaagatggccaaataggaacagctccagtctacagctcccagcttgagtgacacagaagatgggtgattttctgcatttccaactgaggtactgggttcatctcactggggcttgtcggacagtgggtgcagcccacggagagtgagccgaagcagggcggggcaccacctcacccgggaaatgcaaggggttggggaattccctttcctagctaagggaagccatgacagatggtacgtggaaaatcgggacactcctaccctaatactgtgcttttccaatggtcttagcaaacagcacaccaggagattatatcccacgcctggctcggagtgtcccgtgcccacgaagcctcgctcactgctagcacagaagtctgagatcaaactgcaaggctgtagtgaggctgggcaaggggcatctgtcgttgctgaggcttcagtaggtaaagtggctgggaagctcaaacggggtggagcctaccacagctcaaggaggcctgcctgcctctgtagactcccacctctggggccaaggcatagccgaaaaaaaggcagcagaaacttctgcagacttaaacgtccctgtctgacagctttgaagagagtagtggttctcccagcacagagtttgagatctgagaatggacagactgcctcctcaagtgggtccctgacccccaagtagcctaactaggcaacacctcccagtagggactgactgacacctcatatggccgggtgcccctctgagacgaagcttccagaggaaggatcaggcagcaatatttgctgttctgcagcctccactggtgatacccaggcaaactccaacagacctgcagctgagggtcctgactgttagaaggaaagctaacaaacagaaaggacatccacaccaaagccccatctgtacgtcaccatcatcaaagaccaaaggtagataaaacccacaaagatggggagaaaccagagcagaaaagctgaaaattctaaaaaccagagtgcctcttctcctccaaaggaaagcagctccttgccagcaacggaacaaagttggatggagaatgactttcacgagttgagagaagacttcagacgatgggtagtaataaacttcttcgaactaaaggaggatgttccaacccatcacaaagaagctaaaaaccttgaaaaaagattagacgaatggctaactagaataaacagcatagagaagaccttaatgacctgatggagctgaaaaccatggcaagagaactacgtgacacatgcacaagcttcagtagctgatttgatcaagtggaagaaagagtatcagtgatcaaagatcaaatgaatgaaatgaagtgagaagtttagagaaaaaagagtaaaaagaaatgaacaaagcctccaagaaataaggactatgtgaaaagaccaaatctacgtctgattggtgtacctgaaagtgacggagagaatggaaccaagttggaaaacactcttcaggatattatccaggagaacttccccaacctagcaaggcaggccaacattcaaattcaggaaatacagagaacaccagaaagatactcctcaagaagagcaactccaagacaattgtcaggttcgccaaagttgaaataaaggaaaaaatgttaagggcagccagagagaaaggtcagcttacccacaaagggaagcccatcagactaacagtggatctcttggcagaaactctacaagccagaagagactgggggccaatattcaacattctttttttttttttttttttttttgagacggaatcttgctctgttgcccaggctggagtgcagtggcatgatgtcggctcactgcaagatccgcctcccgggttcatgccattcttctgcctcagcctcctgagtagctgggactacaggcgccaccaccatgcccagctaattttttgtatttttagtagagatggggtttcactgtgttagctaggatggtctcgatctcttgacctcatgatccacccacctcagccttccatagtgctgggattacaggtgtgagccaccgtgcccgactcaacattctcaaaagaattttcagcccagaatttcatatccagccaagctaagcttcataagtgaaggagaaataaaatcctttacagacaaacaaatgctgagagattttgtcgccaccaggcctgccttacaagagctcctgaaggaagcactaaacatggaaaggaacaaccggtatcagccactgcaaaaacatgccaaattgtaaagaccatcaatgctaggcagaaactgcatcaactaaccagcaaaataaccagctaacatcataatgacaggatcaaattacaatatttaccttaaatgtaaatgggataaatgccccaattaaaagaaacagactggcaaattggataaagagtcaagacccatcagtgtgctgtattcaggagacccatctcacctgcagagacacacataggctcaaaataaagggatggaggaagatctaccaagcaaatggaaaacaaacaaaaaaagcgggttgcaatcctagtctctgatgaaacagactttaaaccaacaaagagcaatagagacaaagaaggccattacataatggtaaagggatcaatgcaattagaagagctaactatcataaatatatatgcacccaatacaggggcacccatattcataaagcaagtccttagagacctacaaagagacttagactcccacacaataatgggagtctttaacacccccctgttgacattagatcaacgagacagaaagttaacaaggatatgcaggaattgaactcagctctccaccaagcatacctaatagacatctacagaactctccgccccaaatcaacggaatatacattcttctcaacgctacatcgcacttattccaaaactgaccacatagttggaagtaaagcactcctcagcaaatgtaaaagaatagaaattataacaaactgtctctcagaccacagtgcaatcaaactagaactcaggattaagaaactcacttaaaactgctcaactacatggaaactgaacaacctgctcctgaatgactactgggtacataacaaaatgaaggcagaataaagatgttctttgaaacaaatgagaacgaagacacaacagaccagaatctctgggtcacatttaaagcagtgtgtagagggaaatttatagaactaaatgcccacaagagaaagcaggaaagatctaaaattgacaccctattgtcacaattaaaagaattagagaagcagccgggtgcagtggctcatgcctgtaatcccagcactgtgggaggccaaagcgggcagatcatgagatcaggagatcgagaccatcctggctaacacgatgaaaccccatctctactaaaaatacaaaaaaaaaaaaaaatgggccacacgtggtggcaggcgcctgtagttccagctacttgggaggctgaggcaggacaatggtgtgaacccgggaggtggagcttgcagtgagctgagatcgtgccactgcactccaaccttggcgacagagcgagactccgtctcaaaaaaaaaaaaaaaaaaaaaaaaaaaaaaactagagaagagcaaacacattcaaaaattagcagaagtcaagaaagaactaagatcagagcagaattaaaggagatagagacataaaaaaaccctttaaaaaaatcaatgaatccaggagctggttttttgaaaagatcaacaaaattgatagaccgctagcaagactaataagaaaagagagtagatgcaataaaagatgataaaggcgatatcaccacagatcccacagaaatacaaactaccatcagagaatactatgaacacctctacacaaataaactagaaaatctagaagaaatggataaattcctggacacatgcaccctcccaagactaaaccaggaagaagttgaatccctgaatagaccaataactggctctgaaattgaggcaataattaatagcctaccaataaaaaaaagtccaggaccagatggattcacagccgaattctaccagaggtacaaagaggagctggtaccattccttctgaaactgttccaatcaatagaaaaagagggaatcctccctaactcattttatgaggtcagcagcatcctgataccaaagcctgacagacaacaagaaaagagaatttagaccattatccctgatgaacatcgatgcaaaaatcctcaataaaatactggctaaacgaatcctgcagcacatcaaaaagcttatccaccacgatcaagttagtttcatccctgggatgcaaggctggttcatcatacgtaaatcaataaatgtaatccatcatataaacagaaccaaagacaaaaaccacatgattatctaatacatgcagaaaagacttttgacaaaattcaacagcccttcatgctaaaaactctcaatcgactaggtattgatgggacgtatctcaaaataagagctatttatgacaaacccacagccaatgtcatactgaatgggcaaaaactggaagcattccctttgaaaactggcacaagacaggaatgccctctctcaccactcttattcaacatagtgttggaagttctggcctgggcaatcaggcaagagaaagaaataatgtgtattcaaataggaaacaaggaagtcaaattgtccctgtttgcagatgacatgattgtatattggtctcagcccaaaatctccttaagctgataagcaacttcagcaaagtctcaggatactaatgtgcagaaatcacaagcattcctatacaccattaacagacgaacagccaaatcatgagtgaaatctcattcacaattgcttcaaagggaataaaatacctaggaatccaacttacaagggatgtgaaggacctcttcaaggaaaactacaaaccactgctcaacgaaataaaagaggacacaaacaaatggaagaacattccaggctcatggataggaataatcagtatcgtgaaaatggccatactgcccaaagtaatttatagattcaatgccatactcatcaagctacaaatgactttctgcacagaattggaaaaaactactttaaagttcatatggaaccaaaatagagcccacattgccaagacaatcctaagccaaaagaacaaagctgggggcatcacgctacctgacttcaaactatactacaaggctacagtaaccaaaacaacatggtactagtaccaaaacagagatatagaccaatggaacagaacagagccttcagaaataataccacacatctacaagcatctgatctttgacaaaccagatgaaaacaagaaatagggaaaggattccctatttaataaatggtgctgggaaaactggctagccatatgtagaaagctgaaactggatcccttccttacaccttatacaaaaattaatttaagatggattaaagacttaaatattagacctaaaaccataaaaaccctagaggaaaacctaggtaatgccattcaggacatgggcatgggcaaggacttcatgactaaaacaccaaaagcaatggcaacaaaagccaaaattgacaaatgggatctaattaaactaaagagcttctgcacagcaaaagaaaacaccatcagagtgaacaggcaacttacagaatgggagaaaatttttacaatctactcatctgacaaagggctaatatccagaatctacaaagaatttaaatttacaagaaaaaatcaaacaaccccatcaaaaagtgggtgaaggatatgaacagacacttttcagaagaagacatttatgcagccaacagacacatgaaaaaatgctcatcatcactggccatcagagaaacgcaaatcaaaaccacaatgagataccatctcacaccagttagaatggcaatcattaaaaagtcaggaaaaaacaggtgctggaggggatgtggagaaataggaacacttttacactgttggtgggagtgtaaactagttcaaccattgcagaagacagtgttgcgattcctcaattaccatttgacccagccatcccattactgagtatatacccaaaggattataaatcatgctggtataaagacacatgcacacatatgtttattgtggcactattcacaatagcaaagacttggaaccaacccatatgtccatcaatgatagactggattaagaaaatgtggcacatatacaccatggaatactctgcagccataaaaaaggatgagttcatgtcctttgtagggacatggatgaagctggaaacatcattctgagcaaactatcacaaggacagaaaatcaaatgccgcatgttctcactcgtaggtgggaattgaacaatgtgaacacttggacacaggatggggaacatcacacactggggcctgtcgtggggaggggggcgtgttgaggcatagcattaggagatatacctaatgtaaatgacgagttaatgggtgcagcatgccaacatggcacatgtatacatatgtaacaaacctgcacgttgtgcacatgtaccatagaatttaaaatataataataataatatcaggaaacaacaggtgctggagaggatgtggagaattaggaacacttttcggtgttggtgggagtgtaaactagttcaaccattgtggaagacagtgtggcaattcctcaaaggatctagaactagaactatcatttgaccaagtcattccattactgggtatatgcccaaaggattgtaaatcatgctgctataaagacacatgcacacatatgtttattgcggcactattcacaacagcaaagacttggagccaatccagatgtccatcagtgatagactggattaagaaaatgtggcacatatgcatcatggaatactatgcagccataaaaaaggacacgttcatgtcctttgtagggacatggatgaagctggaaaccatcattctgagcaaactatcagaaggacagaaaaccaaacaccatatgttctcactcataggtgggaattgaagaatgagaacacttggacacagggtggtgaacatcacacactggagcctgtcgtggggtgacgggagccgggagggatagcattaggagatatacctaatgtaaatgatgagttaactggtgcagcactccaacatggcacatgtatacatatgtaacaaaccttcattttgtgcacatgtaccatagaacttaaagtataatgataataacaatagtgataaggtcaggaaacaacaagtgctggagaagatgtggagaaataggaacacttttacactgttggtgggactgtaaactagttcaaccattgcggatgacagtgtggtgattcctcaaggatctagaactagaactaccatttgactaggtatatacccaaaggattataaatcatgctgctataaatacacatgcacaagtatgtttattgcagcactgttcacaatagcaaagagttggaaccaatccaaatgtccatcaatgatagactgaattaagaaaatgtggcacatacacaccatggaatactgtgcagccataaaaaaggatgaggtcatgtccattgtagggacatggatgaagctggaaaccatcattctgagcaaacagtcacaaggacagaaaaccaagcaccgcatgttctcactcataggtgggaattgaacaatgagaacacttggacacagagtggggaacatcacacactggggactgttatggggtgtgaggaagggggaggtatagcattaggagatatacctaatgtaaatgacaagttaatgggtgcagcataccaacatggcaaaaaggaaatataggcaggcaaaaaaagattacaggatttttactcactttcgtcaccctatatctaaaatatgacataatttgttcccaaatatttgttttatgtatcagaggctctgaccatattctgcaaaatagataatttttttctttatttagcaatgtaaggctattctttgcttctaaatttggattacagcagtttttttgtgtaagaatagcatatatttacaacttaaaaatgatcttatttattaaaatgcttatttatcagtttgtcattagaatcttgtttatgattatactacattttatctgaaattatactgcattacaatggatgccagtgattcaaaatagccaccttcaatgagtacacagttacagtaaaatattacagctatctacacgaattctttattaatgctacatcagtgttgcataccagattttatgagtaaacatttcttttattattattttgtagttccatttcagtgttttttttttcagtgttagtttcttaatataagtttattgtgttttttggttttatagttttagacaatttgcaattctgtttgtatacctaagtcagtgtggagtttaagagattaatcagccatattgtctgttaaaatctgattatatgtgtgtgtgtttttaatctataaatatgaccccaattttggttatggctaatcttgtatatattttttcttagctgatttttaatggtgtctttatcttgtctaaatgggtagtcatggaaatagtcttattttcaccttgttataataaacatatatttcctttgtgtgagagaagcacttttgtgacttgaaggtaatttttggagagatttataattctgtatcttcttcagttattcttttaaaaaataattgtacaaacacataacctaaaatttaccatcttaaatctatttaagtgtacatttcatggctagtcgtggtggttcacatttgtaatccccagattttgggaggccaaggcaggaagactacttgagcccaaaagcttgagaacatcctgggagatatgtggagaactcatctctataaaacatttttaaaaatagccagacatggtggtgtggtcctatctacttgggagattgaggagggaggattacttgaacatggaagtttgaggctgcaatgagccataattgtgccgtggaccccagcttgggtcacagagtaagaccctgactcaaaaacactgtacgtttcagacatgttaagtatatttacattgtttttagaaaagacttctagaaattttacaatacacattagacaactaccagtttttcccatttcctggcacttttgaaacaccattctgttttctgtttctaagagtataactgctttatagatctctcatacaatttctgttagttgttagaatatgtcctgcttttttgcaaattgagtaattctttggtatttttatattttaaattatatctgttgaacgatttggtgacagaaatttgcattgcttttacctattggcttttagtaacaatgctaaaataattgtgggtatgcaaatgactcttcatgtgaccatatatgtgagagtttatgtatgtgctgcattctattttattagtctactttttcacctttatactcataccaaattgttttaattctgtaggtttgtaatgtgttttgaaatcaggaactgtaatgcctccaacattgttttattttgtttttaatatttttgggcactttgtagagattctatgtacttgagggattgctgtttttctttcatcaaaaatgcagtgagaaatttgaaaaacattgcattaaatctgtagattgcattgagcaggatggacatctttacaatgttgcctttttcagcctttcacaagagcacgctcaagagtgtattgtttaatttccatatatgtgtgaatttttcaggttttttattttcttaattgttgtatactcatttcattttggtgatagaaagtaatttataaaatttcagttttaaaaaatttggtaagatgacttttttttggcataagaagtggtctatcaaggaaagtgttgtgttagctattgagaaccatgtgtgtcctgatgttgaggagtgttttttatacctgtgttaggaataattgttgcctgcaagtcctctattcccttactaatattcttattttatttttattacagaaagtgcagtattgaaatatcctactataattatgttgctctctctgtgtctctgttattctgtcaatatttgctttatatttgaagccctaatgtgagatacacacacacacacacacacacacacacacacacacacacacgtacatatatacaaatttgttataggttcccagtgaataaatctatttttttttttttttttttgagacagagtctcattctgtgtcccaggctggatggagtgcagtggtgtgatctcggctcactgcaacctctgcctcctgggttcaagtgattctcctgccttagcctcccaagtagctagtattataggtgcccaccaccatgcccagctaatttttgtatttttagtagagatggggtttcactatgttggccaggccagtctcgaactcctgacctcaagtgatccacctgcctcggcctcccaaagtgctgggattacaggtgtgagccaccgtgcccagcctaaatctgtaagttttatgtccttttttgtctccttggagttttgacttcaaatacattttataaaatatgacagtttttgactaagatgtaggttgcataatattattttgatttcttctgctctcatttgattaacacttgcatgaaatgtattcttgcatcgtccccctttcagtgtttttttatcattagatctcaactgacttttgtagaaaaaaaagttggatcttggtttttaaaattttaaatctatttattgaaagtatgtctcttgatttgaaagttaattttatatatatttaaataattttctgaaagagacttactgttttaattattttatttgattcttgcatctttgtttctcattttctcttgtgtctttttgatttttgtattgatatgcttttacttatttctaattcactgttgtgtatctatacagattttttttgtgtgtgtggtgccttgggggttacagataacctctataagaaacaacagtatatttttaatttggtataaaataaacttcagttgaataaaaaattcttcctcattacatctgccctgaaatttgtcattgatgttgccaattatgtttttacattgtatattcattaacagatgtttaatttctgtgcttttatttttcaaattttagagaatagattaaaatattttctgcaccattatgataatgccacaagattctatttttgtgtatgtgcatatctttcccagaaaataatgtatttgtatttgattatgtggtattttctcaaattcttttactttcagtttaaagaactgctttcagcgtcttttatatgtagggcatatgcagtgctaataatatactttttcataatttgttttttttttttggaaggttttttctttttatttggtagggcagatttgttgatggtattattctcacttggtagattttttttttttttcaggactttgactgtgtcacacagtttctttctggcctgcaaaattcttgttgataatttactggttataagactatgtttgtaaatgacacattgcttttatcttgcagcttccaagactttcttcttgtctgtgatttttgaaaatgtgcttataaatgtatttgttataaatatctttgtgtgtttcctaatttgtttgttgaacttcctcatttttacatcatttttttcctacttttaggattttccagttatttatttttctgttttttttacctacaaatttaaaaaaaaaattgtagatactttcgtttttattctcatttttctgattcttttttttttttttttcgtttgagacagagtctcgctgtgtcgcctaggctggagtgcagtggcgcgatcttggctcactgcaagccccgcctcccaggttcatgcagttctcctgcctcagcctcccgagtagctgggactacaggcgcctgccaccacgcctggctaatttttttgtattttttttttttagtagagacgggttttcaccgtgttggccaggatggtctcgatctcctgacctcgtgatccacccacctcggcctcccaaaatgctgggattacaggcgtgagccaccacgcccagcccatttttgtgattttctacactgggccgtgttcctgtttcactcattgaatattattcaatttattatcagtgtttaaaattaatgtgtacatcttttttatggtttctttctgaaatttatacaatatttttgatgagactatattgccttgttttgtatacattgtaatctttgattgagatttggacattaaaaagctacctgtcacagtctttaaaatgtagttttttctgacatagtctgaaaataattatcttggctagagattctgagagtctctcaaacatgttcttaggatgtgccttgtctaaaattttgtatttagtttttagttaaagcagtttattattcatgtttctttcttcttctttttttttttttttttctgagacacagttttgctcctgtcacccagcctggagggcagtggcatggtctcagctcactgcagtctccacctcccgggttcaagtggtcctcttgtctcagcctcccacatagctgggattacaggcatttgaccccatgctcagctaattttgtatttttagtagagacagtgtttcaccatgttggccaggctggtctcgaactcctgacctcaggtgatccacccacctcggcttcccaaagtgctaggattacaggtgtgagccaccatgctcagcctgttcatagttcttcttaataaccaataatcacttgctataattgttacctgtctatgatatcacagtctttctgctgctgtaaaacttatctttcatttcagcagactcaaactgtcatttgaaagaatacctctatttctttcagaactttatgtaatgagggacaggaaccagtgtctgtaaaagcccctaccattcagaaataaagatgtataagccagtattttacttgtcttttaaaaaggaaaccaggaattggcaatttatttctaaagtcactatgttttattgggaagcaggaacatctgtgttgggtaaatggaactgacttttcctctatgtggctgtttgcattgggctcacctggggcactgcacacttaacttactttaatttttcacaaatgtaatttggtctgtatgtttttgttacattatatgtctgtgaaaaagttagagcctgtaatattttgctacttgtgatgtagtttgtataattttataggttagatttgtaaagtatattcatctgtatctagtaagtggagtaattgattatttttatttcttgcagttgtatgttcttattttgcccaagacttttggccaaagcagggcataaaaaattgtttccaaaaagtgatactgaaaagatataaaaaatgtggacatgaaaatttacagttaggaaaatactgtaaaagcatggatgagtgtaaggtgcacgaagaatgttacaatggacttaaccagtgtttgagaactacccagagcaaaatattacaatgtgataaatatgtgaaagtctttcataaattttcaaattcaaacagatataagataagacatactggaaagaaacctttcaaatgtaaagaatgtgaaaagtcattttgcatgctttcacacttagctcaacataaaagaattcatactagagagaaaccctacaaatgtaaagaatgtgggaaagcctataatgaggcctcaaacctttctacacataagagaattcatactggaaagaaaccctacaaatgcgaacagtgtggaaaagcctttaaccggctctcacaccttactacacataagataattcatactggaaagaaaccctacatatgtgaggactgtggcaaagcttttaaccaatctgcaaaccttactacacataagagaattcatactggagagaaaccctacaaatgtgaagaaagtggcaaagcttttagccagtcctcaacccttactacacataagataattcatgctggagagaaaccctacaaatatgaagaatgtggcaaatcttttaaccaatcctcaacccttactacacgtaagataattcatactggagagaaattctgcaaatgtgaagaatggggcaaggcctttagccggttatcccaccttactacacataagagaattcattctggagagaaaccctacaaatgtgaagaatgtggcaaagcttttaaacaatcctcaacccttactacacataagaggattcattctggagagaaattctacaaatgtgaagtatgtagcaaagcctttagccggttctcacaccttactacacataagagaattcattctggagagaagccctacaaatgtgaagaatgtggcaaagcttttaacctatcttcacaccttactacacataagataattcatactggagagaaaccctacaaatgtgaagaatgtggcaaagcttttaacctatcttcacaccttactacacataagataattcatactggagagaaaccctacaaatgtgaagaatgtggcaaagcttttaaccagtcctcaactctttctaaacataaggtaattcatactggagagaaaccctacaaatgtggagaatgtggcaaagcctttaaccagtcctcacaccttactacacataagataattcatactggagagaaaccctacaagtgtgaagaatgtggcaaagcctttaacaactcctctattcttaacagacataagatgattcatactggagagaaattctacaaacctgaaagttgtgacaatgcttgtgacaacatctcaaacatttccaaacataaaagaaattgtgctggtgagaaaacatagaaatatgaataatgtgacaaagcctttaaatggttatcacacttgtttgtaagtagggtaattcatactggagaaaacatcacgagtgtgaacagtgtggcaagacttaaacaatgctcacaccttattgcacaggaaagcctttatacttgagaacaaatgtgcaaatataaagaaagtaaaaaagtgattaatatctgctcacatcttaacatcagagaatttatacttaatagcattaaaagtgcaattactgtcaaaagactcttgagaaaatgtaagcctttaaagtgctgaagaggatttattttgaagacaaacattacaaatataaagagagttatagtaactttacttgtaacacagatcttgttgtattcattttgtattagagcaaaccctgaagcaattactcaaactttgttcaacatcagtgaatttgtattgaagaaaaaccctgtaaatgtaataaatttaggaaaaaaacatttattcaaaaactacaggttagaaaactccagagagttcatagtaaaatatatttttgcagatgcagtaaataagaaaaaaaaatttaatccaaaattgtctatgtaaataccagagaatttacattagaaatatataaggcactgacacttcagattttacactaaatcagagttctgagtttagaaaataatccaaaactaaagttgggagaaaaattatttgtatataactttaaaagagtagaagattttttggagagttataattacattacaagtatactttttttggaaagcttacagattttttaaaaagtaatgtaattaactctcaaattacttcatgtaaataatgttgtaattaactcaaattacttcatgctaaataaattaatttctttcttttttttttttcttttaagacagagccccactctgtcacccaggctggagtgcagtggcgctttctcggctcactgcaacctccgtcttcagcattcaatgattctcctgcctcagcctcctgagtagctgggattacaggcacacaccaccacgcccagctaagttttatatttttagtagagctggggttttgccatgttggccaggctggtctcaaactcgtgacctcaggtgatccgcccagcttggcctcccaaagtgctgggattataggtgttagccactgggcccagcccatgctgtttctcttttcctattgtattcatctgtgaaagcgtatgaccaattgttgctgcatcaaagatatgagagattttttttttaggtgagcatttatgacctcttcaatgaaagagtaaggacattaaaatgtaagatgcatgatgaaaatcttaagtaaagaggttctttgtggttcacttacagtattgagtgatgcatgaggtaggtgttcagagtaatattctgcattatattgagagacgaatatttttagttttagttaaaattaaaataatatattattttactaattgtacttttatgaaacaaaatgcaatacatgttaaaaattttatattatgtgtgaaaatttaattgaacatttttaacgttaaatattgtgcattcaatcaagtcacattattccacttaatttaacctagtccaccttactcaagggtgtaggtaaaagatcgtaacaatacactatttggtaaaataatggactaacatctctagtaatcttttttgccagtggctttaaactgcaaataagttaaggaatattgtttctgtaggtaaaatttttatttttttcccatttaaatttacttttgttaatttttgtgggcacataatatttatgttatatatggcatattctgataggcatacaatatataatttatactaataatcacattaggataaatgacgtatccatcacctctagaatttattttttgtattacaaacaattcagttctacagttttagatcatttcaaatgtataattaaattgttattgactacaggtttatttttataataataaaaattatatacaattataaacaaaatttacacatttttgagtcctgaataaatactttaaaaaatttcttatatatttttctttgaatatgtggcctctctgcttgcaaacacatacagacttttagttttgatttacatagagttaaatgtacacatctgttagtctaaatataaaccttaggtgtaagaaaattaataaggtgtctaattttctttttgattcttttttttgacagagttttgccctgttgcctaggctggagtgcagcggtgtgatatcggctcgctgcaacctctgcttcgcagggtcaagcaattttcctgtctcagtctcctgagtagctaggactacaggcccaggccaccacacctggacaatttttgtatttttagtacagacagggtttcatcatattggtcaggctagtcttgaactcctgacctcaggtgatccacccacctcagcctccgaaagtactagaattacaggcatgagccaccatgcccggccaggtgtccaattttctagaaaacaaaaatcttcaaaaatgtgaatgcaaatttctgctctctgctttgttctgaatttattactgtacaatcttatggcttatgattcagaatcttgccatgcaaattctgtttttacttgcctggtactcatgctaggcccataactttcttgtttcttatataagttttttgttttatggtttatgaagttttcattatgtgagctgctctgtgattatatgaatgattttaatgaaattgagtcatggaccgggcgcggtggctcacgcctataatcccaacgctttgggaggccaaggtgggtggatcacttgaggtcaggagttcaagatcaacttggccaacgtggtgaaccctcctctctactaaaaatacaaaaattagccgggcatggtggcgtgcacctgtaatcccagctactgggaggctgaggcaggagaatagctttaacccgggagacagaggttgtagtgagctgagattgcacctctgcactccagcctgggcgacagaggaagaatccatctcaaaaaaaaaagaaatttagtcatgcacacaaaataatttttacctgtaattctaaaattagtttgttaaattatattttatttagttggaacattccattttgttcttttaattggagaaccctatataagcctccttttcttaagttactgtttttttcactttttataatggatataaataaatttattcattgattgggccaatttgttcaggtaagtactagggaagcttcataagtcatgaaaatgtttttatacctaaatgtagcaaacaaacatgacggtgcttgctgtataacagatgctccataataaggcataaatactcctgtgaaacttgcaacttcatgttcagaggtagaaaatatcaaaggtaaacaattgattcttcatgtggcgagtacttttttttcaggctgcaaagctgaattttgctgaatttaaaaagaagttctgcttcatttattttctaattatcttaagttttgtttgtctttttatgtgtattccacccatgtatgcatcatagcccttcttcttcttctgtgttatggctacagttttcccactgttttcttcatgccatgtcatttcatacggtgttttgtgggttttgatgagaactgtgatattttttaatgcactgaaaaattggtttcaactggagagtttgcttatcaatataactttcagatcagttaattaagataaaaggcatacactgtccacaggagagaggattaaatcggttagcatggtgcttctttctttgtaaaaagaaaaagtattgtttgtaaaaagaaaatcatactagattcttacccaaagtgtgacaaatataaaatttgctagaaaatatatcatagaaattaaaattttaagagagtttatggtaagtaaaccatattaaatttaattttttctttttttttttttaagacagtctcactctgtcacccaggctagggtgcggtggcacaatctgggctcactgcaacctacatcttccagattcaagcgattcttccgcctcagcctccctagtagctgccccaagcttaaaataaagcactaaagtacattggctcctcccatgcactgtgctgggtttaaaacatgctgtcaagcctgggcgcggtggctcacgcttgtattccgagcactttgggaggccgaggagggtggatcacctgaggtcaggagttcaagaccagcctggccaaacatggcaaaaacgcatctctaatgaaaatacaaaaattagctgggtgtaacagcacactcctgtaatcccagctacacgggaagctggggcaggagaatcgcttgcacctgtgaggcggagattgcagtgagcagagatggtgccattgtattccagcctgggctacaagagcaaaactctgtctcaaaacaaacaaaaaaaacaaaacaaaaaccatgctgtcaagtatcaaaattcctgtggttatgactgacacatgataaaacagtacaaaaactattttttatactattcagccaagtttatgacaaagacacagacattatttgaaatactgttatctttctataaggttttagaaatgtattctctaacttgaaagagaaaatgtgtatttattctgtaaaacagcattttgaagtatatacaggtggtcagatgcttattagctttatgtaattaatgctttatctcaaatagttaacattttgatggtgagattacataacattgtcttagcattttttcaaacataacaaatgcaatattataaactatagtcgcaatgccgaacaatcttgaacttattcctcctatccaactatatgtattatttggcagatatctttcgaattcccccatttttaaaaataccttggcatctagtggtcaccgttttgttctccacatcaatgagattaagtttttttgaatccatgtgtaagtgaaatgagatactaatcattttgtaactggcttatttcaactaatataatgtccttcaggttaatccatgtgattgaaaatagaattttcttttaaatataaatagtattccattgtgtatatatgccatattgtctttatttacttattagatgttgaactgttgattgcataatttggctgttgggaagagtgctgaaagcaacatagaagtgtgaatatttcttcattctgattttgttttgaatacatacccaacagtgcaattgctgtattatatagtagtttgattttaagtttttttgagtaatctctattttgttattcataatggctgtcctcatttacattcaaaccaacagtgtgtaagcattttcttttattgacatctttaccaactaacacttttttcttttatttatttatttacttatttatttatttatttatttttgagacagtttcactgtgtcacccagcctggagtgcagtggtgcgatcttggctcacttacaacctccgcttcccgggttcaagcaattctcctgcctcagcctcccaagtagctgggattacaggtccctgccatcatgcccagctaattttgtatttttagtagagatggggttttgccatgttggccaggttggtctcaaactcctgacctcaggtgatccacctgccttggcctcccaaaatgctgggattacaggcatgagccattgcatccggcccttttttttttttcatttttagtaagcgtcattctaatgagtgagttgatatctcatagtcttttctggcttgctttccctaataagaattgacattcggctgggcgcagtggcttacacctgtaatctcagcactttgtgaggccaaagcaggcggatcacctgaggtcaggaattcgagaccagcctggcaacatggtgaaaccctgtctctactaaaaatacaacaattagctgggtatggtgacgcatgtctgtaatcccagctactcagtaggctgaggcaggagaatcgcttgaacccatgaggtggaggttgcagtgagacgagatcgtgccactacactccagcctgggtgacagaatgagactccatctccaaaaaaaaaaaaaaaaaaaagacattcagcatttttaaatgtatctatttgccatatgtatgtattttcttgaaaaatatgctttttgctttttttttttttttttttttttttttttttttttttagatggagtctcgctctgttacccaggctggagtgtagtggcgtgatccctcagcctcccaagtagctgggactacaggtgcctgccaccacgcctggctaattttttgttttttagtagagatgaggtttcaccatgttggccaggctgttctcgaactcctgaccttgtgatctgcccgcctgagcctcccgaagtgctgggattacaggcgtgagccactgtgcctggccagctcattttcaatagttatttgttttatgttgtatagtcatttaattttcttatatatttttgatattaataatgccttgtcccattttttagttattctgttgattgtattctatgcagcagcattttaatttgaagtattctgactcatttatttttttccttttgttccctgggattttgagtttaaatgttaatggggccttctctctggttttttttttgttcttgttgttgttttttgtttgtttgtttttgtagtagtaatggtagtttcagagtttcaggccttacatttaaatatctaatttattttgagtggatttttatatgtggtgtgagttagggtctccttttattgctctgcatttggccataaagtattctcaacataattttctgtctttttcctacgaaattgtcacctttatttaaaatcagttagctgtaagtacatggctatatttctggaatctttttttttgctccattggcctagtgtctgtttttattcaagcaccatactgtttttgttactgtacttttgtagtatatttcaaagtcaggtagggtgatagattcacttttttctgttagattgctttggctattgagggtcttttgtggtacaatatacattgtagatgtattttttaagaatttttattaagtatgtcactgatattttcattgaggttgcattatatctttaggttattttgtgtaatacaaatatttaacaatattaataatggcaattcattaatgattaactttttaattcatgtattaatttcttgaatgtttttagagtataatgtaaagtgcttcaaaattttgattaaatttattttaaagtatagttactacagttactgtagatggaattgttttttaaatttattttgagatagttcatagaaatgctactgacatttggatattggttttgtattccacatgtttaataaatttattagttttaatagtttttggtaaagtcttaggcttttcttaggattatgtatagggataaaagattattttttattatttattattttttgagatggagtttcactcttgtcacgtaggctagagtgcaatggtgcgatctcggctcactgcaacctctgcgtgccgcattcaagcaattctcctgcctcagcctcctgtgtagctgggattacacgcatgcgccaccacacccagctaatttttgcattttcagtagagatgggtttcaccatgttgtccaggttggtctcgaactcctgaccttaggtgatgcacctgcctcggcctcccaaagtgctggaattacaggtgtgagccacagcacccagcctgagataaaagattatcatacaatgataatttaactcctttttttccaatctggatgcctttgattttattctttattttctatgtcttggacatttagtactatgtttagtaagactgaagaaagtgcacatccttgacttgttttagctcttagagtaaaatcttacagcatttccctattcagtatgttaatacctgtgcattttttgttatatttgacatttattatcggaattaaccagacaaatcgctccaccaactaaacgccacttgtccctctaagaagttgggggacgccgaccgcaatctcaactcactgcaacctccgcctcctgggttcaagcgattctcctgcctcatcatcccaagtagctgggactacaggtgcctgccaccttccctggctaattttagtattttttagtagagacgaggtttcgccgttttggccaggctggtcccgaactcctgacctcaggtgatccacccgccttggcctcccaaagtgcccaaagtgctggcattacaggcgtgagccactgcacccagcctaacaatcatttttaataaaaattaacacattgaataattgaataattttcattgttgtatatgtgtgtaaatgtataaaatgatacttgaaaaaaataagccagaaaaagtatgttaatatttgtaataaaatgggaaggtagttaattattatttgcaaatgatatcttttgtttacttagataaaaaaagaaactataagactattttaacagtctattcaggtgggtagacaaaattctaagatgatcgccaggattcccaatctgttgcacacctgctgtgtaatcctctcctttggcgtgtaaagaaaatatgacttactgtcgtggaaaatcactcatgaaattaggttgctgatgtattgactttgtgttcatcaaaagggagattatcctgatagggctaaacttaatcagaggtgcttttaagagaaagacacgggccgggcgtggtggctcacgcctgtaatcccagcactttgggaggccgagacgggtggatcacttgaggtcaggagttcgagaccgcctgatcaacgtggtgaaacccatctctactaaaaatacaaaaattaaccagttagccgggcgttgtggcatgcgcctgtaatcccagctcctcaggaggctgagatgggagaatcacttgaacctgggaggcagaggttgtagtgagccaagatcacaccactgtactccagcctgggcgacagagcgagactctatcctccccaaaaaataaaaagacacattgtagaaaaacacccttgctggcctggaagtaagtgacttctaggtggaacaggttgtaagctgctcttggtggccacatggcaggaaacacgtttgtatattgtcatcattcctgccttccacatgttgcttccaatagggaggatcccaggacagagataaaaagggggtcttcttcatgcaaaaataatcacctctcatctgggatagcctaagataaacagaggagaccacaacatgagcaaatcaatgggaggaaaagggcaacctggttgaaagggctcactggcatgatggagcagcatttactaagttgtagtgaatgatcagcctctgggatagcaatagtcagccaaggaggctgaactcatttttattctcattaaatcagcatatctgcaccattctggtggcccagtgttacactacccattacaaaaataacacggagaccagtgggtaacttcctagaattgagcttatcatgaaaaagcatatctcattatttgttttcacaattgaaaagcctcgaaaacaatgaatttattaataatgaacttctgctcattttagaggattctacgttgtcatgtattaaactttaaacactttaatattaatgtcttgaatgcataaactatgcagatagtttaacacgataaaagtaacaattagaaaaaaacatttgaaatgggatagaatttatcaaaatcacatcttttcaatggcttggcataattgccgtgctttctgaagtggctagattattaacaagtagcaaagacaattttggttttgttcaatcattaagttcttgaccatttaaaatctaaaattctggctaaaggatttaaaggccgtattctttagtggcttcttagggtttcacaggcaatacaaaaagaattttgataggcagaaaaatgcattctacatatatacacagtgctcttctctagtttgcattaacattaaaagattgaagatttcaaatctagtctgtcagagtaaattgataaaagttgtatttttcagctaagcaaataattgaataaaataggtaacaatttgtcattagctgccaaaaaatagtatgaccagattcactaagtatctagccacgcaaacgacagcccaattaagtcaagatcctaacaggtgcgtgtggaaagcatttatgggcaatgtggtgcccctccactcagcaccttcttctgcccctttacagagatacaatttcccgagtgactcagggtgaatactaggagctgagaatgctgtattcagtttattaccgggaacataatcaacaaatttatttcatattataaaaattttatgaatcagtttggtgtggtggctcacacctgtaatcctagcactttgggagtcctaggtgggtggctcacaaggtcaagagatggagaccatactagacaacaaggtgaaaccccgtctctactaaaaatacaaaaattagctgggtatggtgacacgtgcccgtattcccagctacttgggagactgaggcaagagaatcggttgaacccgggaggcagaagttgcagttagccgagatcgcgctgcttcactccagcctggcgacagagtgagactccgtcccccccgccaaaaaaaaagaaatgaatactactctgcctcacaaaggcttttagtaaaagattgcatataatactcaatttggattcataaaaatttcaatattccaggtaaatcagcagcacttaaatgtcaaccaaatttcataaaacatatttcaatgagataagtctttttagctaagaattttattttattcgtaaatttagagaaaaatagaaaaccagtactttgagctaaataacagtgtttggcatgagagcaccatccaaacaagtgctcttcatgattaacatagcaatggcaccatgtgctctccttgagcaggccggcctgtttccactgatataaagtggagacggcattgaaatagtgagcgagggtgatataaatggaatatttatattaaatacagtttttaataaaaagcatttgatgttgtacagctacagatgaaattattagtatgaggccgtaatatttttacttctactgacaggataacttgattcacaatattcttatttcaaataatattcctttttttgctgtatatttgctagcttttggtccaaatattaccggaactcaatagaaatcaacaaaattcatctttattttaccacaagcattttgttattgatgcatatgcttattttgcttaaaaatccattagcttttgatgaaagatttgtacttttctttcagtgtgttgtttattgctgacaagtggctgtcctgccaggaaactgctgttctcagctctatccacactgacaaatagtgagtggaagtgaagtgtaagtaagaaccaaatgtgtcttctcttcatcagttttttcatccattggctgaaaaaagagaaagatgcagaaagatgaaagaagatatgatccctgaaagatcacatagaagtcctcttaatgagaaaaaaatggttgtgtgaccataaaatacattattttgctaagcctctgaaattttaatatacaacttgcattgctttcagtccttcagttttgatgcttcaggatatgacacaattccctggtgaatcaaaactgaaaagaataatttattaaggtaagagatacaggaaagacctcttacatttgaccaatatctccacccccagcctttttttttttttttttttttttttttttttttgttgagaaaaactttcgttcttgtcacccaggctggcgtacaatggggcgatctcagcccacggcaacttctgcctcctgggttcaagcgattcccctgcctcagcctcccgagtagctgaaattacagtcacgtgccaccacacccggctaattttgtatttttagtagagactgggtttctccatgttggtcaggctggtcttgaactcccagcctcaggtgatccacccacttagcctcccaaagtgctgggattacaggcttgagccactgtgcctttttttttttttttttttttttttttgagacggagtctcactcttgtccaggctggagtgcagtagtgcaatcttggctcactgcaacctctacctcccaggttcaagtgattctcctgcctcagtctcccaagtagctgggtttacaggtgcccaccaccccgcccagctaatttttgtatttttagtagagacggggtttcaccatgttgcccaggctgttctcaaactcctgatctcaggtgatccacctgcctcagcctcccaaagtgctgggattacaggtgagtcaccacacccggccgagttagaatttttttctactctacctagacatgagatcatgtggctcttccgagacattgtctgcaggcactcagaatggtccagcgtttgacataccaatgtaggcattcctacagtacagcctctaacaaaagtaggctgttccgaacccctggtaatagaatacctttataccaagaaggttggaaaagcatcaaaatctgcttgtggcatgtgcccaggcagacttcgaggggttcgtgctgtaagacttaaagttcttatgaaattgtccaaaacaaacaaacatgtcagcagggcctatggtggttccatgtgtgctaaatgtgttcgtggcaggatcaagcgtgctttccttattgaggagcagaaaatcgttgtgaaagtgttgaaggcacaagcagagtcttctcactcattttatttagctttgcagctaaataaaaagtgaaacttttttgagaaagaaaaaaaaatgagatcatgtggtatgtttttgttttcttttttctttgtgctggctcttttttttagtatttattgatcattcttgggtgtttctcacagagggggatttggcagggtcataggacaatagtggagggaagatcagcagataaacaagtgaacaagggtctctggttttcctaggcagagggccctgccaccttccgcagtgtttgtgtccctgggtacttgagattagggagtggtgatgactcttaacgagcatgctgccttcaagcatctgtttaacaaagcacattgtgcaccgcccttaatccatttaaccctgagtggacacagcacatgtttcagagagcacggggttgggggtaaggttatagattaacagcatcccaaggcagaataacttctcttagtacagaacaaaatggagtctcctatgtctacttctttctacacagacacagcaacaatctgatttctctatcttttccccacctttcccccttttctattcgacaaaaccgccatcgtcatcatggcccgttctcaatgagctgttgggtacacctcccagacggggtggcagccaggcagaggggctcctcacttcccagcaggggtggccaggcagaggcgcccccacctcccggatggggcagctggccgggcggaggcgccccccacctccctcctggatggggcggctggccgggtggggactggcccccacctccctcccggacggggcagctggccaggcgggggctgccccccacctcccggacggggcggctgccgggcggagacgctcctcacttcccagacggggtggctgctgggcggaggggctcctcacttctcagatggggcggccgggcagagatgctcctcgcctcccagacggggtcgcggctgggccgaggcactccatacatcccagatggggcggcggggcagaggcgctccccacatctcagacgatgagcggccgggcagggacgctcctaacttcctagatgggatggtggctgggaagaggcgctcctcacttcccagactgggcagccaggcagaggggctcctcacatcccagacgatgggcggccaggtagagacgctcctcacttcccagacggcgtggcggccgggcagaggctgcaatctcagcactttgggagtccaaggcgggcggctggaaggtggaggttgtagcgagccgagatcatgccactgcactccagcctgggcaacactgagcactgagtgagcgagactccgtctgcaatccccgcacctcgggaggccgaagctggcagattactcgcggttaggtgctggagaccagcccggccaacacagtgaacccccgtctccaccaaaaaaatacgaaaaccagtcaggcgtggcggcgtgcgcctgcaatcccaggcagtctgcaggctgaggcaggagaatcaggcagggaggttgcagtgagccgagatggcggcagtacagtccagcttccactcggcatcagaggaagaccgtggagagggaggaagagggagaccgtggggagacggagatgagggagagggagatggagagctgtgttggctctttttacttaggctaatgtcctacaggttcatcagtatcgttgcagataacaagatttctttatttttaagggctgaatagcattccattgtgtaaatacacgaaattttcttcatccattcacctgttgacacttaggttaacacttaggttgattctctatcttagctattgtgagtaacctacttccttctccttcatttgttttcatatctttttttttttctttctaaaagtattttaatttaaaatacaaattttgactgttaaatgccttcatttttctgccttcttttggataatattttggctaattttaaaaataaattttttaaaaagctcttgggggccaggcaccgtggctcacgcctgtaatcccagcactttgggaggccgaggcaggcagatcacgaggtcaggaggtagagaccatcctggctaacatggtgcaaccatgtctctactaaaaatacaaaaaattagccaagcgtggtagcacgcgcctgtaagtcccagttactagggaggctgaggcaggagaatcgcttgaacccgggaggcggaggttgcagtgagctgagattgcaccactgcactccagcctgggtgacagagtgagactccatctcaaaaaaaaaaaaaagaaaaaagaaaaaaattcttggatcaaggttattacttcattattaacataatttgagacaaaatagcgataaaaataaacattgattagtgaaacaacaattgtctagcccctggtaatcatttcctctctcacccaacatgaaagctgtatctttgtgtcatctctcccagttgtgagaaagacgtttctgattaaattgtttggcataaaattttgtaaaattttactcttttggtgtgaaaatcaaactgctctattactagaaaagtttaccttttgataagtataattttactctattctatttaaattcttcagaaaatcctgacatagaatgcacttaaatttttttgaaaattaaaagtgcttaaacattttttatacaaactaaaaataattttagattcttagaaaacatctttcaaatactttaagttaccttcctctgacagtactttttttatattgctataacacagcttttctgtcctttgtggccaactctgtcacttctatcctatttagttgtgcagtatttatgttttgcattttacatttttttaaggttatagattaacagcatcccaaggcagaagaatttttcttagtacagaacaaaatggaatctcccatgtctacttctttctacacagacacagtaacaatctgatctctctttcttttccccacatttcccccttttctatttgacaaaaccaccatcgtcatcatggcccattcccaatgagctgtcgggtacacctcccagacggggtggcggccgggcagaggggctcctcacttcccagatgaggtggctgggcagaggcgccccccacctcccagacggggcagctggccgggtggaggcaccccccacctccctccgggacggggtggctggctgggcgggggctgccccccacctccctcccggacggggcggctggccgggcgggggctgcccccacctcctggatggggcggctggccggacgggggctgccccccacctcccggacagggcagctgccgggcggaggggctcctcactttccagacagggcggctgctgggcggaggggctcctcactttccagacagggcggctgctgggcggaggggctccttacttcccagatcgggcggctgccaggcggaggggctcctcacttctcagacggggcggccgggcagagacgctcctcacctcccagactgggtggcggtcaggcagagacattcctcagttcccagacggggtcgcggccgggcagaggcgctcctcacatcccagacgaggcgacgggtcagaggcgctccccacatctcagatgatgggcggccgggcagagaggctcctcacttcccagatgggatggcggccaggaagaggcgctcctcacttcccagactgggcagccgggcagagacgctcctcacttcccagacggggtggcggccgggcagaggctacaatctcagcactttgggaggccaaggcaggcggctgggaggtggaggttgtagccagctgagatcacgccactgcactccagcctgggcaccattgagcactgagtgagcaagactccgtctgcaatcccggcacctcaggaggccgaggcaggcggatcactcgcggtcaggagctggagaccagcccggccaacacggcaaaacccagtctccaccaaaaaatgcaaaaaccagtcaggcgtggcggcgcgcgcctgcaatcccaggcagtctgcaggctgaggcaggagaaatcaggcagggaggttgcagtgagcggagatggcggcagcacagtccagcctcggctttcacaactttggtggcatcagagggagaccgtggagagggagagggagaggacattttacattttaaaagttgtaattcatgcaatgtaattttcaaacagttgaccaaccttttttcatgtgaaactctgcttaatcagcagtcactttatttttactcttcaagggcattttcattccctgaaaagcagagcgaaagttcaagtgagtgtgctgagctggtcctcgccagtgtcagtttattcacattcacacaggtgaccttctggggaaagagggttcatttcaacagccttattacaggaatgtggaacagatttaatagagtaaaatgtaaatcactgactttcaagaaaaaaagaaatttttttttattctttgtatgtgagtatgtggtggttgtaaagtttacaataaagactaaagttagagagcacactttacatgaggggtacagtgcaggtcctatgcaaccttctttttgccaaacatgcccttaatgcttttttcaagtagtatgttgctgtatccatcacttatcaggctctgatgatcattttctaatttatcaatttaaatatgcagtcaatatcatccagagttctgtccttgacgtttaactgctcagacataaaactatttaaatattcttgataaaagatgaggttttatttattttactacagagcatttcatgccagtaagcttaagtttcatgaaacttgaaaacatgctttagttttaccttcgtttggaaagccaaatttggccaaaaatgaatacaacaataaacttgaatataaatcattttgaaattgaattcaaattattaaaatattaaaattgataaatgtatttgactatgtgtcaaattattaaaaatttttgaataaaaagtgtaataaagttggaacttgagaaatatgcatgcttttatgataaatcattttgtgattaaagtttcaatttagcagttttgactgttgaaaatgtgaatactgacatatcagagaagaaaatattgataacaaagaatacaaaacaaagcacaatagtgttgatagctgtggtgagtcctcagctcttgtcttagtttcaaaaaatttaaacaagacaaaccacaaagaagatgcagcataatttattgcaaaggagaaagactattttaaaagttagatgcagaatacccagtacacgctgagcgagaagggattcagggcgggcagcttacaggaatgagacgaaaagactagaactaggaacactccatttatgggaatcttacataattattcataaggaggtggaaagaggtgttaactggtaagcatgttctgggtggtcctcttggtgcacatacacagtggctgtacatgcttgtttatatgtcacgtgttattagcatcttaaatctcaaccacggtgtgttttttactatttataatagtaataatgagtaaaaggtcactttaaggacaggtaaaatcaaaatgtgcatgctctctacaagggtatttccctacatgagagagctttgcttgaatgagttgaaatacgatgcaaatgctggggcttactgggttgacaatatgcagttgccatgcattcaccgtggttgctgcatcccgaggacattatcagtatgccaacgtggtatactgtagtagtcactttcttgaatacccatcctgcctcaatagtacttgtactgatttattcccaacgactgactccgagacttaagatttagctattatatcaacattgtcaacagtaggaaaatcaaaattttaaaatcaaatgtatttgagtttgatttgggtaattagctgagtgcccaggaaaaattattttacatttctgaagcttcaatcttcattattaataaaaaatattatctccctcagggctgttttaacacatggtagctataagtatttttaactgaaagtcttgtgtaaatattatagtaaatatttaagaataaatattcatatttcaaagattatgtgagttggtatattttgtcatgtttaatgtatttatcctttccagaaaatgccacagtaagaattttttattttctctggaataaaagactaaggttttctacattgtgactgtgctgatatttgcatagggttttgactgttactgttgaatttaggttgaatttcaaatccactgttgtttagcttgtgtggtttctggttcatttggagaaccaaatatattagacgtgaactgtttggagtaacttggcatcatttcagctgtccttctgttattacatctggggctttagaaatgactaggattcaaataaggttggtttggaatcaagcaatagaaaatccccccaaatactcagggaaatagctactgaataatgcctttcagtgagatttatacatgaaacagagttcaatgaaattcaaaaattattgcaagttttctaaatttagaaactgactgcaaacaacatattaggcacttgtagcttgtctatagcatctgtagcctggggaagctgacattacagaaaagcatattgctactgtaataagatttggaacaaaaacttacgtgcatgtaaacattcccccttagtaatccttaaatacttgtcattctggctcaatctttttggtgcaactgtttatgatttcagagattctatctcaccaatttcaagctatggtgttttcagctcttaatgtttacttgtacccagtaagcttcatggttacatcattatattggggtcccccaggcaatccctgaggcttagagctgaccatcctacctcatcttttttgcttcacatgctgttattgagtccctttcactccatatttgagccttaatgagccttccatttaaggaaaccagaagaatgggttgcccatatatgttgagttgagaatcaggattctcttgagtataaagactttacggccgggcacggtggctcacacctgtaatcccagcactttgggagaccgaggcgggtggatcaggaggtcaggagtttgacaccagcctgaccaatatggtgaaaccctgtctctactaaaaatactaaaattagccaggtgtggtggtgcgcgcctgtagttccagctgcttgggagactgaggcaggggaatcgcttgaacctgggaggcggagatttcagtgagccaagattgccaccactgcactccagcctgggcaacggagcaagattccgtcaataagtaaataaaataaatagactttacatttattcatagtacaaagcagtatttttttttttttaatatggagtctcactctgtcgcacaggctggagtgcagtgtcatgatcttggctcactgcaacctccgcctcctgggttcaagcgattctcctgactcagcctcccgagtagcgtggactacaggcgcatgccaccacgcctgactaatttttgcatttttattagagacgggtttcactatgttggccaggctggtcttgaactcctgacctcgtgatctgccggcctcagcctcccaaagtgctgggattacaggcgtgagccaccacacccggccacaaagcagtgtttttaagatgtgaacatgttttactcaaattaaatataaatgattttatcagtattccaatgtggtgaaaataactgcatgaagttcaccaaatgttctgcttcagactttttcgaaacaaagatcaatatgtatgcactagtggatattagttatttggtgttggttttcatttttaaagattttttccctactttatgctgatgttaagctacacaaagcataccaaaagctataatttaccacactttttaccaaaatttcaaatacttaaatattgaaagtgatattcttgattaccattttttatgtgatgtagtctgcatttattagtactacattgcatttttttatgtggtgccaggttataaaaatgccttccagctgatttcttaggtaacagtagaatctgttttcttagacagtaacatgagaattctttgtatactacctttggaggtactaaaagcagctggttaaaggtactgaaatctgtccttattaatggaaatttaattcaaagactatgcaaagaaaagtcattcaggcaccctgaaactaaattggaatctggttcctgacactgattaacagattgagcagattagagtggacctacgtccctttaaacaatattgaaacacatttttttttgagacagcgtctcgctctgtcacccaggctggagtgcagtggtgcagtctcagctcactgcaacctccacctcctgagttcaagcaattctcattcctcagactcctgagtagctgggattataggtgcctgccaccatggccagctaatttttgtatttttagtagagacagggtttcaccatgttggccaggctggtctctaactcctgacctcaagtgatctgcctgcctcggcctcccaaagtgctgggatcacaggcgtgagccaccgcgcccagccagatttgattttttaaatgtttgtgaatgtgtatcactgtagtgaaaaatcaaattatttaaatctactttctaaataattttgattaaagtattctgtattttgagtgccagtattcatatagtatgccaaatcacccatttgtttactattttgccattttataaaataagcctgaatttgtggagacatttttaaagaaaccgatcttttctacaaaaagatttagacatcgaaaatagagaatttagtttcacattatatatatagtttgctgaaccctacagtaatttgtaaagtttgtttgtgtatgccaatcttagattttctaaaacaaaatgaagggtttttgttttatgttacatttaatatacaaagtccaaaatatgctcagacagacaacttcatcagactccttcatcaactccgtttccatcgtggcgtgaacggtttctcactgctttagcatctgcctttgatttctactaattttctttgactttgatttttcttgtccatctctggtggttgctttgctgctccactttgaggagttcgggcagcttcaccctcagccgctccaacagtccgtccatttggctcaagctctaggcagtttctcctggttcttctgttcctggcgtctgagatttgtcagcagggccagattttcaggaaccatgcatggctatcgcctcctcccgcctggagggctgctcctgcgcctctgaccggcgctggttccagccgcggcccagctgagcacagcaggaaccgcagtagcagccggagcgcccacgcccggggtcgcctagcccaggaacgccttagttgcaaccctgcgtcgaggcccagctccgtgcgcagaaagccgaggccaaccagagcatttcctggacgagtcctctcggcctgcggggccagttcctcctaccagcttcctgctgccacctcggcttccatcagagggacgcttaggatggcgcaggggcccggagacactgtgaagagtccaggggaatgaggaggggctgggccgggcagcctcaggcccagcgcaggttagcgcttctcacgcctgagcagagatcagctactgccactgcggggaggacagaaggacccaggctccccagcctccctctgcaccgggagtgtaggaaactatttaaaaataataataataataataataataagtatggaatagaacttgcagatctaacccaaccaagttttcattctttttccttttccttttcttttttttaatgtatttttctcttatattatgctcgcctgacggaagattttatgttccatcctcacatggaaatttaaatgtaatcataatggtcacaaatttagaaacagtatttactttattttgcctaagaatgctggggtaacattaatttttcaatggtgccttctgaatcttaacgttgattaccttttatttgagtctattaactaaactgtagtaagtaataataataaattcttgatttgcatagggcttaacagtttacaaagggcatgtattcattcgtttaaccgataaatgtgcgttgagctacacgttgtgctatattttttgctagccttgggagataaaattaataaaagaaagtattggccgggtgctgtggctcacgcctgtaatcccagcactttgggaggccgaggcgggcggatcacgaggtcagaagttcgagaccagcctggccaacatagtgaaaccccgtctctactaaaaatacagaaattagccgggcatggtggcacgcgcctgtagtcctggctactcaggaggctgagtaaggagaatcacttgaacttgggaggcggaggttgtggtggtgagccaagatctcaccactgcactccagcctgggcaacagagcgagactcaaaaaaacaacaacaaaaaaagaaagtgttgatctcttctctcaggaaactttcagtctggcttcataaaatcctcacacactctcataaagtctcttaagtcttctataagcctgctaccccaaagtgaccactatctgaattttgtgttattcactttatgcaattttatgaacaatatacattttagtgttgcctgtttcttttttttgtatatatatgctagcattagttttcatgtgtgccttttttaatttatatgtatattttcctatttttccatgttgctttgcatagcaacagtgattttatgtacctttggaagcagtattgtatgtatgtttcctgggttagaccagtgtcttcaacggttagaagagcaggctcagacagcctgtgtaacgttgggcaagtatcttaacctctctgattcctctgttacttagagataataacatggcagtgaaatccgtgttgttctttgaatgtaataataaagtaggtaaagttatattaagaacaataaaaacattacaaaagacaaaagagtatttatagatacattcaagacttaaacataagataatattttaaacaattttatgttattaaatttgaaaatttagataaaactacctttttttttccagaaaactatgtgacaaaaactgattaaggaagaaataaaaaagataaatagaaaaattggccgggcacagtggctcacacctgtaatcccagcactttgggaggccaagggaggtggatcacgaggtcaagagatcgagaccatcctggccaacatggtgaaaccctgtctctactaaaaaaaataaaaataaaaaaataaaaatttaaaaaaattagccgggttggtggcgggcgcctgtagtcccagctactcaggaggctgaggcaggaaaatcacttgaacctgggaggtggaggttgcagtgagccaagattgcgccactgcactccagcctggtgacagagcgagactccgtctcaaaaaaaaaaaaaagaaaaaatgttgtttttaattttacacacctaaaaagtacatgtattataaaagaacagcttgataaatgtttacaaaagatatataccatgaacccagcacccagcagtggaagagtatgaacaacctggacactccccctcctttattctcctttttttttcttttcttttctttttttttttgagaagaattctcgctctgttgccccaggctggagtgcagtggtgtgatcttggctcactgcgacctctgcctcctaggctcaagccattctgccttagcctcctgagtagctgggattacaggtgcacaccacaacacctggctagtttttgtatttttagtagagacggggtttcaccatgttggtcaggctggtctcgaactcctgacctcatgatctgcccgcctcagcctcccaaagtggtgggattacaggcgtgagccaccgcacccagctattctccttttcaatcactgttctgccaacagaaacttatatcctggctttttatacaataaataatatttgtctgtttttgaactttaaataaatagattaatacaataagttctcatttttggccagcttcttttgttcaacattgtgagattaatctctgttgctgtctgtggtttgcatatttattgatctaccatgtgacatcatataaatacactacaatttatttattcaactgttcatgaacattttgttaaatttccagatttttcagtgcgtctatagaccatcttgtgctttttttttttttttttttgaggtgtcgcccaggctggggtgcagtggcacgatctcggctcactccaacctccgcctcccgggttcaagcaattctcctgcctcagcctcccgagtagctgggattacaggcatgcgccaccacgcccggctaattttgtatttttagtagagaaggggtttctccatattggtcaggctggtctcgacctcccgatctcaggtgatctgccacctcggcctcccaaagtgctggcattacaagcatgacccaccgcgcccgcttgtgtgcatttttaaagataaatttctgcaattatgtagatattttaccacaaatataattaaaatatatttatatcttcagcttgtgtaggcattggcaagccctcttccagaatgtagtaccaacttatactaccagcactacaggatggattatatattatctaattgtctttattttctaaaccctacagtgtaaactttgtgaagtcaaaggcctttaatttcattcaccataatatttgcaatttttaattaaatgaattttatttgactttgaagcattttcttttttttttcttttttttttttttgagacagagtctcgctctgtcacccaggctggagtgcagtggcgtgatctcggctcactgcaacctctgcctccctggttcaagcaattctcctgcctcagcctcccgagtagctgggattacaggcgcccgccaccatgcttggctaattttttgtatatttagtctggtctcaaattcctgacctggtgatctgctgcctcggcctccgaaagtgctgagattacaggcatgagctaccacgcctagcctgaagcatttgttttcttaaaaataactggggtagatcgggctcggtggctcatgcctgtaatcccagcactttgggaggctgaggcaggtggatcacctgaggtcaggagttcgagaccagcctgaccaacatggtctctactaaaaatacagcattagctgggtgtggtggtgcatgcctgtaatcccagctacttgggagactgagacaggagaattgcttgaacccaggaggcagaggttgcagtgagccgagattgcgccgttgcactccagcctgggcaacaagagtgaaattctgtctcaaataaataaataaataataaaaaatgactggggtaaaattgatttatttatgcttttctgaacatttttttccacatctctgtctctttacacataagatttatctgccaaaattttttttcttattttgaccattctcagtgagggtcattccaccccaggagatactgtaaccaagcaggtgcaattgaaggcaggccttggctgaccaggtgagctctaagcaattgtaaataactaccttccaaatatgtataatttatattttttatttatataccataaacgtttattaagctgtaatatttacaatattattttctgttctgagatctacaactatatctacataacaccaatgacaatattttaataaacaggaggaatatatatatatagctttacaaaaaaagcctgatacatttgcatcgtataagatactgtagaatcaatttccaaagctcaaagaactaaaacacacacacacagacacacacacacaaacatcctaatacaagagtcaacatttctcctctttcctgggtccaggtatgagagtcatcactgtgtctgtgagctgagaccagaaataagacacccacctgtggcaacatccacatataaaagtcacaatacaaactgtgagctatatccacaagtgagactcagaacctcagcagtgggctccgtccatgtgtgagggtgataatcctgtcagctgggtgtgcatagaagagtcacaatctcaactttgtactgggacctaatatgaaacccttggtgaaatgtaagggctttatattatatacatgagtgtggtaatcttctgagaactttctgcaagtagaagactcaggaccttacccattgccctaagcccagctacaagaatcaacacctcttctattggctaaatccaagtatgagagtcatcattgcacctgtgagcttgatccagaaatgagtcatcatctcacacattgctaaatttacataggacagtcacaactctaactgtggaccatgtccacatgtgagattcaggacctcaccagtggattctgtccatgtgtgagagtgacaattctaattgtccactgggcgtgcctatgggatgcacaatctcacctgtgtgctgagtcctgttaggacactctgtgtcactcaaggatgttataggatatgcatgagtgtcatcatcttctgtgacattaccacaaataggaaacagaagaccttacctattcccctaattctagccatgagagtcaaaatcttttctgttggttgggtccacatatgacagtcatcatcacacctgtgagctaggcctaggtatgtcacaatcccacctgtgggaagaccagacaggagagtcacattgcttgaatgttggtctaggaatatttcaataaccccatgtgttcagggccctggcaagaaagtcacattacttgagtgctgagctcagcaatatgtcaaaatgcctctgtgggcagggcttagcctagagaaccacatcacctgggttctgtgtaaagcaatatttcacaattaactctgtttacatggctcaggaaggaaaggaaagtcatgtaggttctggcctactggataggtcacaatccctcctttgacagaactcaggcagcagagtcacatcatttgtgtgtagggcccagtatatgtcaaaatcctcactgcagtcaggggccatgatggaagaaagagtcatgtcacctaggttctgggcaaggaatatgtcacaatccacctgtggactcagctctggccccagagtcacatctcctgagcactaaattcaggaatatgtcacagtgccctttgtggtacaggccagagcagatgtatcacatcacctaggtgctatgcccagcaatatgtcactatttattttgtgggcaaggcccaagcaaaagaagaattacatcatctaggtgatgagccccatgatatatcacagtgccccctttgtgtagggtccaagcagaagtgaaaagtctcatcattgtgtcttgggcctaggaatacatcacaatggcttgtgtaagcagtgcttaggcagaagagtcccattacctaggtgctgggcccagagatatgtggaaatcttcctgtgggcagagcacaagcaggtgaggaaggtcacatcagctaggtggtaggcccagagatatgtcacaatttcccctttagggcaggccaatgcagaagagtcacatcacctgggagatagtccccacattatgtcaccttgccccttgtagacagggccctggtgggagctgaaaatcgcatgacctaagggctagtcttagcgatatcttacaattctcttttaggacagagtacagacaggagaggagagtcacatcacctaagtactgagcccagtgacatgtcaccattctcttttatggcagggaccaggagcgtcacatcaccaaggtgttgggttcagtgatatgtcaaaatctcccctatggacaggggccaggcaggagaaaacactgatatggtttggctgtgtccccacccaaatctcaccttaaattttagcaatcccttcatgttaagagcaaggacaggtaaatataattgaattatggaggtggttttatactgttcttggggtagtgaataagtctcgtgggatctaatggttttataaaagggagttcccatgcacaggcctttatgcctgccaccatgtaagatgcctttttgctcttcctttatcttttaccatgactgtgggcctcctcagccatgtggaactgtgagtccattaaacctatttcttctataaattacccagtcttgaggatgactttattcgcagtatgagaacagactaatgtagaaagtcacaattttagttgatgggcccacacatatatcacaatgccctctgtgggcagggcccatgcagcagagtcaaaccacttgagtgctgggcccagcattttgtaacaatcacagctgtgggtggcacatattcagaagaggatagccacttcacccaggtgatggggccagagatatgtcacgatgccccttttgggcaaagcccaggtagtagaggagagtcacctcacctaggtctggggcccagtgatattttctatttttttgtatgtaaggcacaggaaaaagtcacatcacataggttctgggttcagtgatatgtcacaattcttcctatgggcaacacagaggcagaagagtcacctcacgtacatgctggatacagtaatatatcaattttccctgaaaacagggctctggcaggtaaaaagaatcccattacttgggtgatgagcagaaagatgtgtcacaatgccttttgtaggcgggcaaggccaggcaggagactaacatcacctgggtcctgggctcagcaacatgtcacaatctccccttgggcattgcccaggcatgaaaagagagttacatcatctaggtgatacatccaaatacatgtcacacacacaaaaaaacagggcctagaaaaaaatagagacagattacctaggtgctggatccagagacatgttacattcccttctgtgagccagaaccaggcaggagaggagagtcacatcacctagatgatgggtgcagaggtatgtcacagtgttctccataggcgaagcccagataggagagttaaatcatctgggttcaaggcttatgagtagggctcactcaggagaaaagagtcacatcatttagctgttgaacatggtaacatgtcacaatacccactgtgggtgggtcaataaagggaagaagcattacatcacctaggtgatgagcccagtgacatctcacatttcccactgttgggagggcccaaacaggagagagtcacattacctaggtgctgggcccagcgatatgcaactctcccccgctgagcagattccaggcaggagaggaaagtgacatcatctgcttgctgggctcagcaatatgttaccattcatcctgtggatggggtccaggtagtagaggtgaaaaaaatcacctaggttctggattcagtgatatgtcataatacccccgagggaatgacccagggatgagaggggagtcccttaatctagttaatgttcccagggatatgtcacaatgtccctgtaggaacagggaggaatgtcacaatgtcccatattccagggaggaatgtcctggaggaagaaatctaaatgctgggcttagcaatatgtcacaatcttttctgtttgcagatcccaggcaaaagaagaaagtcacagcatttaggtgtttggcccaggtatatgtcacaattccagttttggcctgggccaaggcaggaaagtcaaattactaaggagctgggcaaaggcatatgtcataatcacatttgtgggaaggtacagggatgagattgacaaccctgtatatgtcccagctctaggtatgagattcaacatctgtgtgttgggtcctcgtacatgagtcacaaactcaatggtggactgggcatgtgcatgagacctcaatctcaccagcagactatatcccagtagggaactcacagcctcacaggggtgctaaatccaggtcagagagtcattatctcacttgtggactggattcttgtctgagacacaattccaaattttgactgcctccagctatgagatttaggacttcaacagtgtgctgtattcaagtgggagggtgacaattcttacatcacctgggtgtacatacaagagtcacaatctcatcagtgtgctgggccctattatgacacactgtacaacttgagggctttaaaatatacacctgagagccacaatctgctctgagaccttcatgcttgtatggatctgtgatcttactcattgccctagaatcaggtatgagattgaacatctcttattggctggatccaggtatgagagttaccaccattcctgtgatctgagtccataaatgagtcaccattggaactgtggccatattcacatatgataatcacaattccaactgtggactgtgtttgcaattcaggcttagaattttaccaacaggctctgtccatgtgagagagtgacagttataactgtggcctgggtgtgcatatgagagtcacaatctctactgtatgctgagtcctgttatgatactctctgtaccactcaagtgctttatatagtatgagtgagtgatgtgatcctttgtgatctttatacaatttagaaactaaggaacttactggttgccctaatcttagctatgaaaattaccatctctcctattagctgagtccaggtacaagagtcatcctcatccctgttagctgggagcagggataaggctggatcatcacatcccgtgggtgctggaccagggctcggcaaatgtatacataaaaatcacacctgcaagaaggtccagtggttagatttacaattctgcacgtgtcccagctttaggtatgagagtcaacacctcctgtgagttacgcacaagtacaggactcatcatctcaatagtaaattggatccatgcatgagagtcccagccccacctaggggctgtgttctggtgtgagagtaacaggcccatgggtgtgctgaattctggtccaagcatcaccaccccacctgtggatgggatccatgtatgaaagtcatgattttaactgtcaactgtctctggatgtcagattcagaacctcaaaggtgagctgtgtccatgtgggagagtggcaactcttatttttgggtgagtgtgcatttaaggatcacaatcttccctgtgtgattggcaccgttatgacattttctgtatcacccaaaggctttatatgatatgcatgagagtcacagtctgctctgagagttttgtgctagtatgacccatgattttacctgttgccctaagcccaggtatgagagtcaacctctcactaatttgctgtatccaggaatgacagtcatcactgtgcctgtcagctggattcagaagtgagtcaccatcccacccgtggctggatccacgtataagtcacaattttaactgcaaactgcatttacatgtgagatttgagatcttaacatgtgtaagttaaaatcctaactgtcggctgggtgtgcatgtgagaatcacagtctcacctatgtgctgagccctgttatgacactctttgcaccaactgaaagccttatacaatatgcatgagtattgtaattttctctgaccgtcgtacaagaaacacacccaaaccttactcactgcttgaagcctagcaaagagaatcaatatctctcctatttgctgggttcaggtatgattgtcatcattgcaccagtgagctgagcccagatgtatgtcacaatcccgcccgtagacagggaccaggcagaagagtcacatcacctggatgctaggacaggaatatgtcaatcctcattatgagcaggatgagggaagaagagtcattgctgggttctgggcctagtgatatgccacagcccttcatgtgggcaggtcccaagcagacgagaacaataacattacttaggtgatgagcccagcaatatgtaacaatgcccaatatgagcagggcccagggaagagaggagagtcacatcacctagttgctggttcccataatatgttgcaattcccactgttcacaggacttagcaaaagaagtgagtcacaaaatttaggtgctgggctgggtgtggtggctcatgcctgtaatcccagcactttgggaggccaaggcaggcaggtcacctgaggtcgggagctcgagaccagcctgaccaacatggagaaaccctgtctctactaaaaaaaaaaatccaaacatagccaggcgtggtggcacatggctgtaatttcagctactcaggaggctgaggcaggagaatcccttgaacctgggaggcggaggttggagtgagccgagattgcgccattgcatgctagcctgggcaacaagagtgaaactctgtctcaaaaaaaaaaaaaaaaattaggtgctgggttaagcaatagttcaaatagttcacaatccccactgttggcaaagatcaggcagcagagaagactcaaatcacctagatgcttggtgcagcaatatgttacatgttcttctgaagctgagacccagacaggagagaagagtatcttcacctaggtgtttgactaagaaatatgtcataatgtcccatgtggggagaaataagtcagaacaagcacatcacctaggtgctgggcccagtggtatgtcacaatcttctctgtgatcaaagccttggcacaaggggagagtcacattacctaggtgttgaattcagaaatatgtaacaatcacttctaagtaatgggttcaggcagatgaggagagtcatgttaccttggtccttggccttgatatatgtcacaatttcatttgtgggctgagcccacaaagaaaactaaaatcactcagggtatgggcaaaagcatacatcacaatcacacctgcagaaaagtccagggatgagatacacaatcccaaacatgtccagctccagggaggacagtcaacacctcctgtgtgttcagtccgagtatgcaagtcagaatctagatattggactggatttgtgcctgagagtctcaaatcaaccttcagattgtgtcctggtagtagagtcacagcctcagaggtgtgataaatcttggtctggagtcattatctcatctgtggacctgatctatgtatgagactcacaattccaacttttagctacctcttgagtgtgagattcatgacctcaacagtgggctgtagctatttaagagggtgaaaattcttactgtgaactggacgtgcatatgagggtcactatctcacctgtgcactgggccctgttaccacactcttggtgccactcgagggctgtctatggtatgcctcaaagtcacaatccacaattagatctacatgctggtatgaactcatgatcttacccattgtcctaagcccaggaatgagagctaacatctctcttattggctagggtcagatgtgagagttctcactgtgcctgtgagttgggtgcagaaagaagtcatcatcccacctgtggccagatccatgtatgacaatcaaaatttcttttttttttcttttttttttttgagatggagtctcgccctgttgcccaggctggagcacagtggcatgatctcagctcaccacaacctccccctgctgggttcaagtgattctcctgcctcagcctcccgagtagctgggactacaggtgcgtgccaccatgcccagccaatttttgtatttttagtagagatggggtttcactgtgttggccaggctggtctcgaactcctgaccttgtgatccacccgcctcagcctcccaaagtgctgggccactgtgcccggatgacagttacaatttcaactgtggacggcatccacatgtgatactcaggacctcaccgtggtctctgtccatgtgtgggagtgacaatcctcactgtttgctgggtatgcctatgagaatcacagttttaactttatgctggaatctgttatgacactctctgtatcatcagaagggatcatacaatatgcatgagttttgtaatcttctgtgaccttcatacaagtagaaagtccaggaccttgcccattgcttgaaggctacctatgagcgtcaacatatctcctcttggctagatccaggtatgcagctaatcactgtgcctctgagctgggtccagaaatcagtcactgttcaacttgtttccaggtgtacacatgacagtcagacttttcactgtggactgcatctgcgtgtgaggttcagaagctcaccagtgtgcttctttcatgtttggaagtgacaatcccaattgttggcttggtatgcctgtgagagtcacagtctcacctgtgtgctgagtcctattattacattctctgtagcacatgaagtatttataagatatgcataaattttatacatctctgtgacccttctaaagtaggaaacccaggactttacctattgcctaaagtctaactaagagcgtcaaaatcattcctattgtctgggttctcatatgagtgtaatcgtaatgcctgtgagctggaaaaactatatgtcaaaacttagcctgtgtgaataaaccagaaaagagaatcatgtcacctgaacactggactaaaaacatgtcgctatccactctgtggggagggccatggcagagaagtcccataacctgggtactggtcccagcagtatgttgcaatgccttctgtgggcaaggttcatgcaggaaagacacattatctgcatgcagggcacagcaatatgtcaccctgtgtacagggctcaggtaagagaggagagtcacaatatccagttgttgggcctattgataggtcacaatgcctccttttggaggagccaaggcaggagagtcatatcatttatgcatagggctcagtgatatatcacaacccacactgcggcaaagcccatgcaaaagagtaaagtcatatcacttaggtgattggcccagttatatgctacaactatctgtgttggcagggcccaagcaggagaggacaattacataacctgggttatgggcccaaagatatgtcacaatttcccctgaggacaaggcctatgtaggaaaggaaaataacttaaatgcttggctcaggtatacatcacaattttatttttgggctttacccaggcaggagagtcaaatcactcaggtgctgggcaaatgtatatatcacaatcacactagcaagaaggtcgagaaatgagattcaaaattccacacattttctgacttcaggtatgagagccaagagacctcatttgagttgggtccaagtacataagtcacaatcttaatggtggactcaatccctgcaagagagccccaattccaaatgcaactatttctgaatctaagagtcacagcctcacaggtgttctgaatcctagtctttgagtcaccattctacctgttaagcagatccaagtatgagagtcataattccaactttcaactgcctccatgtgtgagatccacagcctcaacagtggacggtttccatgtgtgacagtgccaatgtttactgttggctgagtgtgcataggagagtcacaatttcacctgtgttcttggttgtgttatgatactatctgtattacccatgggctttttatggtataagtggcagttgaaatctgctttgagaccttcatgctggtatgaaccaatgattgtacccattgccctatgcccaggtatgagagtcacatctctcttgttggccagatataggtatgacagtcatcaaagtgtctgtaagctggctccaaaaataggtcagcataccaactgtcccaggacccacatatgactgtcacacatctaattttggagtttgcccatgagattcaggacctcaccagtgggctcttcttatgtgtgagggtgacaatcctaactgtcagctgggcatgcctatgagagtaacaatctcacttgtgtagtggatcctgttattatactctcaatattacacagaagctttataggataagcttgagtgtcataatcttttgtgatctttcctcacataagagacacattactttatccattgcgctaagcctaaaataaaaaggcaaaaaacacccttattggcgggtccgtatatcaaattagccagtaaaaaagatactctctgtcctagccaggctgagagaaacaggtcttctgggtcttctctttgtacaaagatcataaaaaattaccacttccttccaaattgtataaagaccttgggtgatgcggagagtgtaaaatgcaggtgatacagagagtgtatccagcacacaatagaaatttttcttattttatgtacacccagccaaccattagccttgtcaccctcacacataaacagagcccactggtaaggtcctgaatctaactcgtggatgcagttcacagttgaaattgggactgcatatgtgaacacctggctacagttggaatagtgactcatttctaaacccagctcataggcagatgaagaccctcgtatctaaactcagccattcttaaagatgttcactctcatatctgggcttagaatcacaggtaaaattgtaggttcacacaagcacaaaagtttcagaatggattgcaactctcatgcatactgcataatgccctcagtaagacagagagggtccttacagggccgggcacacaaatgagattgtgacactcatatgcacacccagccaacggtaaaaactgtcatccaaccacatgaatgcagccagtgttaaagtcctgaatctcagccgggtgcggtggctcactcctgtaatcccagcactttgggaggccgaggtgggcggatcatgaggtcaggagattgaaaccatcctggctaacacggcgaaaccccgtctctactaaaaatacaaaaaattagccgggtgtggtggcgggctcctgtagtcccagctactcgggaggctgaggcaggagaatggcatgaacctgggaggcggagcttgcagtgagccaagatcatgccactgcactccagcctgggcaacggactgaggctccgtctccaaaaaaaaaaaaaaaaaaaagtcctgaatctcatgccaggaggcagtcgaaagttggaaaactgattctcatatgtggagagtcagcaacccacctgaccaagattcatcatacctgtgaggctgtgaccctttgaaaataatacagtgcatgggagggattgtggctgtcatgcaaggatcctgtccgctgttgagattgtaactcttgtactgagacccaacatacagaatgtattgactcttatacctagaactgggccatgtgcatgattgttaattttatccctggacttttctgcaggtgtgatcgtgacatatttctttgcccagtacctgagtgatttgactctcttgcctgggccctctccttatagggtgttgtgacatatttccgaacccaggactaagtgatttgactttcttctgccacttgggctctgaccaagaagggattgtgatgtattactggacccagaaccaaggtgatgtgactcttctcttacatcagggcactgccaaaaaaaaattgtgacatatcacaggaccctgattctagatgatgtaactctcctctttttgctttgccccacatattttggataccatgacacatcgctaggcccagaacctaggggatgtgaggctcctgcctaagcccaccctgcagcgagccttgtgacatatgtctgcatccatgacctaagaattgtgactctttctgcctgaactttgccaacaaggaaaattgtgacatatttctgcacctaccaaccagctgatgtgtctctcctgcctgggattttcccagagagagcattgtgacatattgctgggtccagcagccaggtgaggtggttctgttcctgttgcattgttttcaggagaagatttttaaatattcttggctaagcatgctaatgatgtgactctccagcctggtccctgttttcagaaaagactgtgacgtatccatggcctagtgcctaggtgatgtggctctcctgttcgctccctaccaagaggtggcattgtgacatatatcttggttcagctcacagatgcaataatgactatcataccttgtgagttgaaccaggcaatagaagagatactgactctcacatttaggcttagaaaaatgagtaagaccctgtgtctcctctttgtatgaaggttatagaaagttaccactcacatatcacataaagcatttgggtactacaatgtcatcacaaatcccagaacatgagtgagactgtgttctcgtgtgcacagtccaccaaccattagaatttccaccctctcacattgacagagactacaggtgatgttttgaatcacacacaaatgcagtcagtccacagtttaaactgtgacttttatatctgaacatcaaggcacaattggaatggttattcatttttaaacccagcttataggcaggtgaagactctcctatccggacacagtcaataagaaagatgttgactctcacgcctgggcttagggccataggtacgatcaaaggtctcttctaacatgaagatttcagagcaaattttgactctcatgcatattgtataaagccctcgagtggtacagagagtgttctaacagggtccagcacgcaagtgcaattgtaactctcatctgcacacccaggcaagagtaaagattgtcattgccccacatgaacacagctcactgttgaggttctgaatctcacagcctgaggtggctaaaagttgcaaacttgactctcatacatgaatctgttccacaagtgggttcatgacactcagattaagattcagcaaacccgtgaggctgtgactgtacttaaaaaacacaatccccagaaggaatagggctgtcaaacatagatcctgttggccaatgggattgtgacttgtgtacttagaatgaccatacagagattgactcatacctataactgggacatgtgtgagattgttaatctcaaccctggaccttcctgtaggtgttattgttacatatgccgcagtccagcacctgagtgatttgactctactgcctggacccagctcacatatgagattgtaacatataactgggcgctgggacattttgacaccactgggccttgcactcgggtgatgtcttctctcatgccttgacgctgcccacgggaggcattgtaatataccattgggtcctatgcccatttgatttaactctcctgcctaagtcctgcctatacagaaaattgtttcatatcctgggcctgtcaccaagtgatgtgactatcttcatttgcctgatcctagctctcaggggagaatggaacatatcactttgttcagtactgagctgatgtgacttctcttgccttctgaggttttcctcacaggggagattgtgacataaagctgggcccaacaccatggtgatgttactcttttgccttggcactgtcttcagaaggccttgtgacatattgctgttaccagcaccaaggtgaagtgtgtcttgtgtttggaccctgcccatagagtgcattgtgacatatctttgggcccatcaactatttgatttgactatccccccttaccacatctttgcccataagggatatggtgacatatatctgggcccagcaccttggaaatgcgatgctcctctcttgcctgaggtatgttcagaaaagaaagggtgatgtattgttgtttatcacctaggtgatatgacctagtacattactgagtgcaaatgtggtgtgatacttctgcctggtccttgccaataaaggtaactggaatatatctctgagagcataacttagatgatgtgagtctccttttgtttcttgagtctgtccacagtggaaattatgatatattgccaggccttgcacccagtttttgtgactctcctgcttgtgtcctttccatgtggggcattgtgacatatttctgaatccaacaccaaggtgatgttactctcttgcctggaatattgttacatctctctgcactcatcactcaggtgatttgacttcttcctcctgcctggtccctgctctcagagggcattgtgacatatcacttggctcagcacctacatcatgtgactctccactcatgcctcaaccatggcttactagggtgattgtgaaatataacttggtctatctcataggctttgtgactttcttcttcctgagccctaacacagaaagcattgggatatacctctgggcctcttgcctaggtgaggagacttttctgcctaggccctcttcttagggggtattgtgacatattgctggacccagcaactagatgatgatgatgtgattctcttctactgcttggactttgcccaagaaggaattgtgttgtatcatggagctaagaacctaggtgttgtgactctcctcttctgccggggccctgcatacattctatgttgtgacatatggctgggatcaaaacctaggtgatgcaactcttcaacctgggccctgccagcggggtattatgacatctttttgttcatcacctaggtgttgtgactctctccttctgcctgggttccgacaaaaaaggggattggggcatgtcccttgaccgagcacctaggtgatgtgactgtcttatttgcctgggccttgcatatttggggtattgagacatatggctgggccctacatcaatgggatttaaggctcctgccttggtcctgctaacagaaaactttttacatatccctgaatccatcacctaggatatgtgattctcttcttctgccggcattctgcccacaggaaacactgggacatattgctgggcccaccattgagatgatgtggcattcctgcctgggtactgcccacagggagcattgtgacacatcactgggcccaccagtgagatgatgtggcattcctgcctgggtactgcccacagggagcattgtgacacatcactgggcccagcacctaggtgatgtgagtatgcatcatgttccctgctttcaggaaggcattgtaaaatatccctgactgagcatccagggatgtggctcttctagctggtctttgtcctcagggaagagtatgatatatgccttgcccagctcccaggtgatatgactctcctgctcactctctacctataggtgggattatgacatatcttggcccagcttacaggtagtatgctgaccctctttcctcgaaccagtcaatataagagatactttcatagctagacttagtgaaatgggtaagatcctgggtctcctctttgtattaaagtcatagagaattaccactttcttgtatcttatataaagtcctccagtggtagagaggatgtcatcacagggcccaggacacaagtgagattgtgtttctcatacacacatccagccaactgttaggattgtcaccctcacatctaaacagagcctactggtgaaatgctgaatctcacatgcagacgaagtctgcagttaaaattctgactgtcatatgtgaacacctggccacagttgcgatggtgactcatttctaaacccagctcatagagaggtcaggattctcccatctagactcagccaataggagagatgttgagtctcatacgtggaattaggggcacaggtacaatcatcggtgcataacagcatgaaggtctcagagcagatgttgactctcatacataacatatgcagcccctgaatggtagagagactgtcctcacagagcccagcaaacaggtgaagttgtgacactcctttgcataggtggccaatagtaaagattgtcatccttccacgtgaacacagcccaccgttaaggttctgaatctcccacctggaggcagtggaaagttggagaattaactctcatacattgatcttgtccctaggttggttggtgaatctcagatcaagattccccacatctgtgaggctgtgactgcactaaggggaaacagtcttcagaaggagttaagtctcttttgtacagattcagtttatttttgagattgtgactcatgtacttaaaccaaacctacaactggggcatgtgtgggactgttaatcctatccctggaccttcctgtaggcgtgattctgatgtatgcccctccctgggtctaccttccaatagagattatgacatgtcattttgccccatacttagctgatgtgatctattctcctgtcttggctgtctccatagaagatattatgatgtatctacaggccctgcacccagtttacgtgatttctgcctgtggcctgcccacattggctattttgacatattgcacagtccaacacccaggtgattttactcttctgcctgggcccttcctacgggggacattaggacatatttctgtgcccattgtgtgtgtgtgtgtgtgtgtgtgtgtgtgtgtgtgtgtgtgtgtgtgtctgtgtgtgttttgagacagaatctcactctgtcactgaggctggagtgcagtggcatgatcttggctcactgcaacctccacctcacaggttcaagtgattcttgtgcctcagcctcccaagtagctgggattacaggcgcctgccatcactcctggctaagttttgtatttttagtagagatggggtttcactatgttgaccaggctggtctcaaactcctgacctctggtgatccacctgcctcggcctcccaaagttctgggattaaacgcatgagcgaccgcacccggccacatccatgtgttttgactctcttctcccgcatgatttctgttgaggggggggattgagacatatctctggtctcagcacccaactgatgtgactcatctctttttcctatgttttgctcacacaaaagatagtgacatatcgctaggccaaacaaagtggcattactctcttgatttggtcctcctctcaaaaggcatcatgacatattgatgggcccagcacgaaagtgatttaagtctcatgcctagactctgcttacaggggcattgtgacatatctctgggccaatctactatttgatgtgactctccttttgtacctgggctttgcctatagaagacattgtgacatatctctcggctctgcacccaggtgacttgacttgcctcttctgcttgggccatacctacagggaacattgatacatatctgtggccccaacatgtagatgatgtgactattttcttttttcttggacccgtccacagtgggaattgtgacatatcacttggcttagcatttgtgtagtgtgactctcctctcatacctaggccttgtccactggggtgatatatatctgggcgtagcccctaggttatttgaagctcctcttttccatgatccctacttatagcatgcattgtgaaatctctggtctactcacctcggttatatgactttcttttatttttatttttatttatttatttttgagatggagtttggctcttcttgtccaggctcaagtgcaattgtacgatcttggctaactgcaacctctgcctcccagtttcaagcgattctcctgcctcagcctcctgagtagctcggattacaggcacacgctactatgcccagctaatttttgtattttcaatatagatggggtttcaccatgttgaccaggctggtattgaactcccaacctcaggtgatctgcctacctcaacctcccaaagtgctgggatttcaggtgtgagccactgtgcctggccataactttcttttatttgcccttccatcaggggacattttgacatattgctgggcctattatctggatgatgtgactctcctcacctgcctgcaaactaccagaaagggacattgtgacatatctctaaaccaattttctacataatgtgcctcttctctgctgcccaaaacatgcataaagaaaatattctttaggcccctgtgacctatctctggacccggcacccaaatgtcatgactatccagtctgggctctgcctagaggaaatgttatgatatgtcactgggccatgaacacaagtgatgtgactctcctgcctgggccttgcccatagaggggattgagacattccaggtgaagaatcaaggtggtgttactcttatttctcagccttttcctaaggtaaaattgtgacatataacttggcccagcacacagatgagatttttactcttgtatgcaaacccagccaaaagttactattgtcactataacacatgaacaaagaccactgttgaggtcctgagtcttatatgtgaacacagccaacagttggaattgggactgtcatatgtttatcttgccagaagtgagatggtgacttactctggattcagttcacaggaatggtgatgactctcatacctgaacccagctaataagagagatgttgactctggtagctaggctttggggtctgggtcctttacttggaggaaggcaacagaagattatgacatccatgtatgttgtataaagctcttgggaaatactgagtgtcattacagggcccagtacacaggtgtgattgtgagtctcctatacatacctagccaacagtttgaattgccatgcttatacatagaccgagcctactggtgaggtcctaaatcttacacatgaacctattccaccattgaaattgtggctgtcatatgtggatccagccataggttggatgttgacaaatttctgaacccaactcacttgcacaataaacccagccaatagaagatattttgactcttgtacctaggcttagggcaacaggtaaggttttgggttttctacttgtataaatgtcacagaggattactgcactcacttatattgtataatgcccccaaggttgtaaagaaagtgtcactacataactcagcacaaagttgagattgtgaatctcaaatgcacactcagccaacagtaagaattgtcattcacacacatggacagaacccactggtgaggtcctgaattttagtcacagatgcaatccacagttgaaatttttaatgtcatgtgtgcatctagccacaggagggatggtgacacatatctgaacccaactaagaggcagagcaatgacttttatacctggaaccagccaatacgagagatgttgactctcacacctgggcatggggcaacaggtaaactcatgcgtttatacagcactaatgtctcacaggggattatgagtctcacccaaataatgtacagccctctggtggtacagagagtgtcataagaggacccagaacacagctgagtttgtgattctcatatacacttccatcccacagtaaaaattgtcatcctcccacatgaatacagacaactgttgagagtcacatcacctaggtgctggtcctagagatatgccacagtctattctgtgggcacagttcaggtaagagaagagaagaggaaagtcacattaactaggtgattggctcagagctatgtcacaatgctcctacaaggcagggtccaggcaggagactcaaatcaccttggtgctgagtccaacaatatgtcacaatctcccctgtaggcagaacctgagaaaaagagttacaagaattacatgtgggcctattgataggtcataatctttcctgtgagcagaaaccaggcagtagaaaaggttcatatcacctgcgtgattggcacatagatatgtgaaaatgctccctacaggtagaccccaggcaggaggcttacataacgtgaatgtcagccccaaaaatatgtcacaatgaacccacacgggctgggcacaggcagaagagacatataacctgagtgctaagtgcggggcctagaaacatgtgacaatgctccatgtaggcagggccaaggcagaatagaataacatcacctatgttctgggtccagtgatatatcacaatttcatctctgggctgagactcaaatcatgctgggtgctgggcacatgacatgtcagtcacacctgcaggtaggtccagggacgagattaacaatcctgcacatgtcccagttttaggtatgagagtcaacactgttgcgggaagtcagggaccccaaacggagggaccggctgaagtcatgacagtagaacgtggattgcaaatatttcatggacacttatcacttccccaatcaatacccttgtgatttcctatgcctgtctttactttaatctcttaatcctgtcagccaagaaggatgtatatcgtctcaggaccctgtaataattgcgttaactatacaaattgtacagcgtgtgtgtttgaggaatatgaaatgtgggcaccctgaaaaaagaacaggataacagcaatagttcagggaataagagagataaccttaaactctgaccgccagtgagccgggcagaacagagccatatgtctcttctttcaaaagcaaatgggagaaatatcgctgaattctttttctcagcatgggatatccctgagagagaatgcacacctaggggtaggtctctgaactggcccccccggggcgtacctgtctcttatggttgagactgcaggggtgaaataaattccagcctcccatagtgctcccaggcttattaggaagaggaaattcccacctaataaattttggtcagactggttgatctcaaaaccctgtctcctgataagatgttatcaatgacaatggtgcccgaaacttcattagcaattttaatttcgcctcggtcctgtggccctctgatctcaccctgcctccacttgccttgtgatattctattaccctgttaagtacttgatgtctgtcacccacacctatttcgcacactccctccccttttgaaaatccctaataaaaacttgctggtttttgtggcttgtggggcatcagggatcctaccaatgtgtgatgtctcccccagatgcccagctttaaaatttctctcttttgtactctgtccctttatttcttaagccagccaacgcttaggaaaatagaaaagaacctacatgattttgggggcaggtcccccgaaacaacacatcctgaatgttgggtccatctacatgaggcacatctcatcagtgaaccggatctatgcatcatagcctcaattcctattgcagattgtgttgacttaatggagtcccagcctccttggtgtgctgaatcctggtctgagagtcaccaagccacctgtggaccacaattatgcacaagagcctttttttttttttaatcttctgactgcctctgggtgtgagatttagaacttcaacagtgcactgtgttgatgtatggcttacatctttacttgaccatccttactttcagctgggttttcatatgagggtcacaatcccacctatcttctgggccctgtgaaaacattctctgtaccaactgatggcattatacattgtgcattagtgtcaccattcactccgagacattcatgctggtatggaccaatgattgtacctgtggccctaagccaagatatgacagtcaacatcactctagttggctcggtccagataggagagtcccgcctatgagtggatttagaaatgagttaccattccaagtgtggccaaatcttcacgtatgaaagtcgtaattccaagtgtaagctgcattcctgtgtgagatttaaaacttcatcagtgggctttgtcatgtatgaatgtgattaatgaaatggttggcagggtgtgtgtatgtaacacacaatttcacatgtgtgccgggctttgtgttgacactctctgtaccacccaaggtctttatatgatatgcaacaaagtggtaacccattacctttgaacaaagggaaggcccacaatattacccatattggctggttcgaggtataaaagtcatcatcacacctgtaaactaagcaaagataaatgtcacaaccctacttgtgggtagggagcaagcagaagaatcacatcatctgggtccttctccagggatatgtcacaatcatttttgagggcagggaattggcaggaaagtcacattatctgtgtgctgggctcagtgataagtcactctctattttgtgcagatggtccaggacaaagctcataggagagaagagttcccatcaaagagttgatgggtccaaagatatgtcaaattaccccttgtgggcaggatgcaggcaggagacttacatcaccttggcgctgggcccagaaatatgtcacaatgtcttgtgattgcagtgtgaaggcaagagtaacgtcaacatagtgctgggacaagggacatgttacaatctccccggtgggcagaagctagggaaaagagaaaagccacatcagctaggtgctagtctcagagataagtcacaatttttcctgtagactgagaccaggctggataagagagtcacatcacctgaataaaaggcacagagataggtcaaatgccccttgtaggaaggtcccaagcaggagagttacatcatgtgggtgatgggactcagcaatacacctcaatggcccatatgggcagggaacaggcaggagagccaaatatcctgggtgcagggcccagtgatatgtcacaatgccctctggggcatcgccaagacaagagaggagattcacagcacctggctacaaggcccagaaatatgtcacaatgtcccctgtggttagagacaaagcaaaatagttacatcaattagatactgagtccaatgatatctcacaatttacctttgagcccaggcagaaaactcaaatcactcatgtggtgggcaggggcatatgtcacactctcacctgctggaaggtctagtgatgagattaagaatttagttgccgggcacagtggctcatgcctgtaatcccagcacttttggaggccgaggcaggcagatcacctgaggtcaggagttcgagaccagcctgaccaacatgacaaaaccctgtctccactaaaaatacaaaaaattagctggtcgttgtggcagatacctataatcccagctactcaggaggctgaggcaggaggatcgcttgaacctgggaggcagaggctgcagtgagcagagatcattacactgcactccagcctgagcaagagtgagattctgtctcaaaaacaaaaaaaagaaggaaggaaggaaggaaggaaagaaaaaaagaaaaagaaagaaagaaaaagaaaaagaaagaaagaaagagagaaagaatgaaaagtatttagcatgtgtcttggttctaggtacaacacctcttgtatgttgagtctaaatacaggagtcacaatctcagtggtggactggaatcaattatttttgtggactgtgtgagcctcaatcacttttgtggactgtgtctccttagtcacagccttacaggtgtgccgagtcatggtccaaaatttgccagccctccttttgactggatccacatgtgaaagtccacactttgactgcctccagttgtgagatttagttcctcaactgtgggctgtgttcatgcggaaaggtgacatcttgactgttgggtgtgtgtgcatatgagtgtcatattctcatctgcgttctcggttttgttaggacactctgtatcacctgagggctttatacattatgtatgagagtcacaatctgctctgacatatttgtactgatatggacccatgattgtacccgtggccctaagcccaggtatgagagtcaacatctcttcaattaggagagtccagattggaaagtttttacctgcttataggctgggtttattaaagagtcactaacccaacaatggccagatgttcacatatgacagtcacaattttaactttggactgtgtctacttgtgagtttcaggacctcaaaattggaccctgtccatgtgtgagggtgacaactttaaaggttggcaggttgcgcatacaaaaaacaatctcatatttgtgctgtgtcctgcgatgacagtttgtaccacttgatggctttataccgtatgtgagggagtggtaattctctatgacatttatacaaagaaaagacccattattttacccatttccctaagcctagctattagagacagtatatcttttattaacttttttgggggggtacaaatgtcatcatcatatcagtaatctccacaaatatatatatcaacatccctcccatgtgtagggaatgaggagagttatgtcaccttggcactggcccaggaatatgtcacactcttttcggagggcaaagaccaggcaggagagtcacatcaccttgatgcttagcgaggaatatgttacaatcccctcctgaaagtagggcacaggtggcagggtaacatcacctgggtgcagggcctagtgttatatcccaatactttttgtgggcaaggcccaggcaggagaggcatgtcacctgttttttgggcccagtaataggttacagtcttccaagtagaaagaagaagagtcactactttttgctgatgaatgcaaagatatgtcacaatttccttgtaggtagggtccagacataagcctctaatctaattccactaatccacactaattccaactctggctctgccagcttcttatgacttattgtatacttttcatttctgttatgctccaggaatgagtttctcagtgacttttgaagtaatttgtccacagctttggataaacattgccctcttgaatccaagggctgttttgttgagcatatgaaggcttcccttgagtattcctctcgcttccgttcactttcttctgtagcctccatttttctaattgctttcctatagcccctttttggcagttagctgaaaaacggccttcacagctactaaaagaatatgggaagtggaaatctgagaagagaaatacttattttgttgctagaatgctcttaccgagagtcactagaggtcaatggagtcgacgacataggccggaccaaggccacaggtgcaagagacacataaagcagagatcaaaatttgggtgtacatggtaagacttgcccattccagaaccccaaggatgaagagggggccacagttcaatcccatatctcctctgttctcaagtgggtaactagtgaatcacctacaaatagtgatcagcagcttcccaacaatatctcaagagttgggcgagtggggggaagtaatgcaagacccctgaagtatgacaacatacaaaaccccaagttaaacaccgtgcacttgccttttaagtcacccacttggccctcttctaagtgtactttccttccttttgtttctgttctgtagctttctaataaacttttactgctactctaaatcttgcctgctttatgtctcctgctttatgcccctcagttgagttgtttcttctgaggaggcaagaatcgaggttcctgatgactcatacccacatgaattcacttccagtaacaggtaacaggtaggagaaaagagtaacatcacctaggtgctggtccaggaatatgtcacaataccgtattaggggaggatccaggaaaagagtcatattacctaggtgaagtgcttagagatgtgtcacaatgacccctatgggtaggactcaggaagaagagaagagttaaattacctagaagctgtgcccagctatatgtcacaatcagcccagtgggaaaagccaaggcatgaggcacatcatgtaggtgctgggtcaagtgatatgtcacaacctcctctgtggacaggtcccaggaagaaaaggagacacacatcatctagcagaaaagcccaaagtatgtaatgatgattcctatgggcaaggatcaaggcagtagaatcacatcatctgtgtgctgggcccagtcataagtcactctcttctgtaggcatagcccaggcaggagagcagagttacatcaactaagtgctggacccagagatatgtcacattctctcctatgggcaaagagcaggtataatatggtaaccacttcaaatacttgagcttccagagaccatgtcacaatggtctctatggttagggttcaagcaggagactcacgtcacgttgattgtggccccaacaatatgtcacaatgttttctgagaagagggtcaaggtaaaaaagcaatgtcactttggtattgggcccagcaatatgtcactgtctcccatgtgagcagatatcaggcaagagaagagaatcacatcaccttagttatgagcacagacatgtcacaaagccccaagtaggtagtgccaaggcaggagaatagtgtcacatcacctaggtgctgggtccagtgatatgccacaatcccatctgtcagctaggccccccacaagagtcaaatcactcaggtgctaggagaggtgtatgtcacaataacatctacaggaagatccaggggtgagattaacaattccgtacttgtcccagttttaggtataagagtcaacacctcctgaatgttgagtctaagtacatgagtcacaatctcaagagtggactgcatgaaagcctctattcctcctgtaaactttgtattcttagtaaagtcgccatttcatgggtgtgctgaaccatagtgtgggagtcaccaacctacctgtggaccagatctatgtttgcaagtcaattttccaacttttgactgccttcgggtgtaggattcagaaactccacagtgggctgtgtgatgtcaccagctaaagggctattcatgcacagaagggttgttattgtaatcatcatggtttctgttgcttttaccttgttaagaatacatgcgtggctcataattgtgctagaaaaccctaagggttttggttaaattacctgttgttgtatgttataaagtagacataaaattggccaaaatagattaaaattctacaaatgtggagtcaagtttctcttgactccaagagaaacttggaggcttaggaaagacagacctggaaaaaacccaataaaaggctaatcagaagctcagaaaaactgcaaccagctgtcctttatctacctatgacctggaagctcccaccccacttcgtgttgtcccacctttctggacaatgtacatcttacatatagtgatggatgtctcctgtctccctaaaatgtataaaactaacacatgccccaaccaccttgggcacgcattgtcacagcctcctgacactgtgtcaccggtgtgttcttaaccttggcaaaatgaactttctaaattgagacctgtctcgatactttgggttcaaattagtaatttcaggtagaaattaaaattcttcttacaatagaaacaaacaaaaggactaaacagagaaaaactaataaaagtgtgctcaaggccgggcatgtgctcacacctgtaatcccagcactttgagaggctgaggtggatcactcgaggtcaggagttcaagaccagcatcgccaacatggtaaaaccccatctctactaaaaatgcaaaaattagcaaagcacagtggtgcgtgcctgtaatcccagctactcaggagggtgaggcaggagaaccatttgcacccgagggcaggggttgaaatgagccgagattgcacaactgcacttcagcctgggtgacaagagtgaaactccatctaaaaaaaaaaaatctaaaatttatatggtatgacaaaaaactctgaagagcagaaggattcaagcaaaaaagaaaggctaaaagtatcatcctacttgactttgaaatatacagcaaagctatagtaatgaaaacagtatgatacttgaacaaaaatagtcacattggccaatggagaataaaagagaaaccagaaatacatccatgtatttaaggctaaccaattttttatatagatgacaatttcttaggaaaatgacagtatctttaaatgtaaagcctgaagctctgaaactactaaaaaatatatagattgaaagccctataacattggtttgggcagtgattttttttatttaacctcaaaatcccagggaactaaagatcatacatgtgacaaggggtgaatatcaagattatgtaagaaagtaaaaaacaaataactactaaaaatgagcaaaaggcttaaatatttttcaaaaaaagacatacatatggccaacagatatttaaaaatgctcaatgtcacttattatcagagaaaggcaagccaaaaaatctatgagatataaagtcactcatattagaatgattcttattaaaaagaaaaaaaagcattggtaaagatgtgaagaaaagggaatgcttgcacactgcaggtttgagtgtaaatgaggaaaaccattatgaaaactgaaatagagatttcttaataaatttaaaatcaaactaccatataatacagcaatttcactattggatatatatatttaaaaacaaatgaaataagaatgagaaacatttgcacttctatgttgtttgcaacactcttcacaatagccaaaatatagaatcaacagttcaacatccaatgagtaaatattgacaatgtagtatatatacacaatggaatactatttctcttttagaaagaaaactctattatgttcaatcacatggattaacctggaggacattatattagtttaaataagccaggaacagaaacattaaaattttatgatttcacctacacaggaatgatataaaacttaaattaagtagagagcaaaattgtaaccatcagacgccaaggtatttagaagaaagagggctttagaaagatgtttgtcaaagaatacataattataatagcatacaagtaacacattcaaaagactgattgtacagcatggtatctacagttaatagtaatgtatttttgaaaaatgctaggataatgtcatgtgctcttaccacaaaaatgttaactgtgtgaagtaaagcattaattacctaaaattaagcatttgacaatgtatatatatacttcaaaacatgttttacagaacatgttttatctatcaagttgaaaaatatatatttgaaacattatagaaggataccaattttttcaaatactctctgtctttgtcattaacttggctaaatagtatccaaaatatatttttgtgctgtttttgtcatttaatttttcagtcataaccataggagctctgacatttaacagcatgttctgaatgcagtactgtgcataggaggagccaatgtacattagggtttttattttaagcttgggacagcaggagtttctggggctaattgcaatggtatgaaagacattaaaagggcaggtgttgtttgttctcaagactggccactgtttgaacacagtaaacaagtttgcatgcaaaataataggaaatgttttaatctgaaagccatcgtaacctcatctccaaaattttttcagagaaaatgaccaaagagttgcctacagtgaggtgactaaaaataaaaactgtagactgaacttcaccaacttcaaaaattatacaacagtaaaaattttctccaaattgtaatatcagtatgaaaaataaacacttcaaatgtctaatcaacagagtacattttattatttttcaacatttaacatttacacttaaaaataggagtctgtataaaaatgtaacgtgctgtatcatagaaaattaaatttagaatccttacttaccactaactctcttttaaatataacttataagatatattttgtaacaaattttatgcttgccacactttgtgtaagaatccaataagattcttcttttacaaacaaagaaaaacaatgttaactgatttaattattccacgtgtggacagtgtatgtctcttattttaattaactaatctgaaagttatattggcaagcaaattctccacttaaaatccattttttagcacattaaaaatagcaacttttggccaggggtgatggctcatgcctgtaatcccagcattttgggaggctgaggaggtggggatcatgcggtcaggagttcgagaccagtctggccaatatagtgaaaccccatctctactaaaaatacaaaagttagctgggcatggtggcgcatgcctgtagtcccagctacttgggagactgaggcagaagaatcacttgaacccaggaggcaaaggttggagtgagccaagatcacaccactgcactccagcctgggtgacagaatgagactccatctcagaaaaaacaaaacaaaacaaaacaaaacaaaacaaaaccaaccaactttctcatcagaacctacaaaataccatgtaaaataacatggtaggaagacaactgagacaattgtagctgtaacacagaaaaagaattagaagaactgtgatgcatacatacttgaaatgaatatatgacaaacaaaactgaacataattaaaaaataaagaagcagaatttctctttaaattcagcaagagtaaactttgcatcctgggaaaaatgtcctctcaacatgaggaatcaatgtaatttcttctccattgatattttccattctgacttaaagttacaaactaactccaggaggaatacttatggcttatcatgaagcatctgctacacagcaagcactgccatgtttgtttgctgcatttatatacaaaaacatcctcttgacttatcgaagccttcctagtacttacctgaacaaacttgctcagtaaataaacttatgacaattttaaaaatagagaagaacaataaccaagtaaaagtgagcttatatagggttctccaagtaaaagaaataaatgaaatcttctaactaaataaaatataacttaatacactaattgtggaattacatctaaaaatcatttcatgtacactactaaatttcataaaaattattcttatactccatgaccagctcacataatgtatacttcataaactacaaaacaatatatgatatatatgagatatatatgtgatatatatatgagatatatatgatatatatatgatatatatatgagatatatatgagatatatatatgatatatatatgagatatatatgatatatatatgagatatatatatgatatatatgagatatatatatgagatatatatgatatatatatgaaatatatatatatgacatatatatatgaaaaaagaaaattgtgggtcttgcattgagtaccaggcaagtaaaaacaaagaaatttcatggggagattctgaaccataagatgtaagattttacagtaatgaattcaatacaaaccagagagtacagatttgctttccagattttttaggtttttggttttctagtaaattagtcaccttattacaataatttgttctgttctaataattttttttctgaaaataggtacaaactcataattacacaaacacacttacttcataattttcttctaaggtatagctttagagtaatatatatgtatgtttaaccctatgtaaataaaaactaaaagtctgcatggggctaccccctttgggtcccctccctttgtatgggagctctgttttcactctattaaatcttgcaactgcacactcttctggtccatgtttgttatggctcgagctgaacttttgctcaccatccaccactgctgtttgctgctgtcacagacctgccgctgacttccacccctccagatccagcagggtgtctgctgtgctcctgatccagcgaggtgcccactgccaatcccaatagggctaaggcttgccattgttcctgcatggctaagtgcctgggtttgtcctaattgagctgaacactagtcactgggttccacggttctcttccgtgacccacggcttctaacagagctataacactcactgcatggctcaagattccattccttggaatctgtgaagccaagaaccccaggtcagagaacaagaggcttgctgctatcttggaagcagcccgccaccaccttgggagctccaggagcaaagaccccttcatggcaaccacgaagggacctctaaagcagtgagtaaaattggaccactttcaccttgctattctgtcctgcccttccttagaattggaggaaaatactgggcacctgtcagccagttaaaaacgattagtgtggccgccggacttaagactcaggtgtgaggctgtctgggaaagggctttccaacaatccccaacccttctggattgggagcgttggtctgcctggaaccagcttccactttcaattttcctgaggaagccgagggctgactagaggcagaaagctgtcgtcccgaactcccagcgttagccgattgagatcatggtgcagccagaagtctctactcaacagtctcccatgcgtgcacccctacctttccttctgacccatatctcctgggtcctgactatgactttcttgaaagtgtagccccaaaattctccttatctctgaatctacttcctctgatccctgcctcctaggtactaatggttcagattttcatttactctagcaagttgtatctccaaagggatgtaaggaagctctacactgtgtccttaggcccctaggctatgaacccacaaagtcttgtccctggtgtccctcccaatttaggtatacagctctcagcatgggcagttacacaggacctgttccccaccacccttgccagggccccaagtttgtaaagagctaggagaaaagagagagagacagaggggagagaaagagagagagacaaagagggagaaagagagagagacaaagagggagacagagagagagagacaaagagaaagatagaagtagtaaagaaaaaacagtgtgccctattcctttaaaagccagggtaaatttaaaacctataattgttcattgaaagtcttctctgtgaccttataacactccaataccacttggctgtcagtgtaaacaagggcgtagccctaaagcactgaggccactgacaacccatagccttcctatcaaaaattcttaacccagtaacccatggatgggacaaatgcattcagtcagtagtggcactgctttgctataagtagaaaaactttagagggaacctcattgtgagcacaccttgccagttcagagctatcctaagtcaaaaaaaaaaaaagcaaaaaggtagcttactaactcaaatcttaaagtatgggactattctgttagaaaaaggtgatttaacattgaccactgaaaattcccttaacccagcagatttcctaacaggggatttaaatcttaattaccatacaaaggtccaaccagacctaggaggaactccctcatgacaggaccatagatggttcctcccaggtgattgaggaaaaaaaaaaaaacacacacacacaatgggtattcagtaattgaggtaaactcttgtagaagcagagttaggaaaattgcctaataactagtctgctcaaacgtgtgagctgtttgcactcagccaagccttaaagtacttacagaatcaaaaaactctatctcggtcctgactcaaaaggttacccacaccctctctgaagtgaatttgcatatgaactgttgtttgtaggaatgcatcttgatggggcatctgggttgttatgaaatattcaggaaccccgcctagctctagaactcacctatgagcacaaagtcaacattaggcatgctggtaaaggaccactagaatccagcagcccagacccctttctttgtggtcaagaaaggtgggaaaacaggtgcagaactgctacatcagtaaacgtaactaatccaataagcagaagtccatggggttacacactctggaaaggaataagcattaggaccatagaggatgctgcaggactaatgctcatcggaaaatgactaagggtactagcatccttatgttttttttttcagatgggaaacattccctccaaggcaaaaatgcccctaagatgtattctggagaattcagcccagtcagggtatatgtacctttttccctgtcagacttgaggcaaactgaaatagccctaggtaaattatcagataaccctgatggctatattgatgttttacaagggttaggacaatcctttgatctgacatggagagataaaatgttactgttagatcagacactaaccccaaatgagagaagtgccaccataactgcagcctgagagttcggtgatctctggtatgtcagtcaggtcaatgatagtatgacaacagaggaaagagaatgattccccacaggccagcaggtaattcccagtgtagaccctcattgagacgcagaaccagaacatgtagattgatgctgcagacatttgctaacttgcatgctagaaagactaaggaaaactaggaagaagcctattaattattcaatgatgtccactataacacagggaaaggaagaaaatcctactgcctttctggagagactaagggaggcattaaggaagcatatctctctgtcacctgactctattaaaggccaactaatcttaaaggataagtttatcactcagtcagttgcagacattagaaaaaaacttcaaaagtctgccttaggcctggagcaaaacttagaaaccctgttgaacttggcaacctcggttttttataatagagatcaggaggaacaggcagaatgagacaaatgagattaaaaaaaaaaaaggctttagtcatggccctcaggcaaacagactttggaggctctggaacacggaaagcctgggcaaatcaaatgcctaatagggcttccttccagtgtggtctacaaagacactttaaaaaagattgtccaaatagaaataagccaccccctcatccatgccccttatgtcaagggaatcactggaaggcccactgccccaggggatgaaggtcctctgagtcagaagccactaaccagatgatccagcagcaggactgagggtgcccggggcaagcgccagcccatgccaccaccctcacagagccccgggtattcttaaccattgaaggccaggtggttaaccacctcctggacactggcgtgtcagtcttactctcctgtcccagacaactgtcctccagatctgtcactatctgagggttcctaggacagccagtcactagatacttcttccagccactaagttgtgactggggaactttactcttttcacatgcttttctaattatgcctgaaagccccactcgctttttagggagagacattctagcaaaagcaggggccattatacacctgaacataggagaaggaacacctgtttgttgtcccctgcttgaggaattaatcctgaagtctggaaaacagaaggacaatataggcaagcaaagaatgcccgtcctgttcaagttaaactaaaggagtccacctcctttccctaccaaaggcagtacccctttagacccgaggcccaacaaggactccaaaagattaaggacctaaaagcccaaggcctagtaaaaccctgcaatagcccctgcaatcctccaattttaggagtacaggaacctaacggacagtgcatgttagtgcaagatctcaggattatcagtgaggccgttgtccctctatacccagctgtatctaacccttatactctactctgctttcccaaataccagaggaagcagagtgttttacagtcctggaccttaaggatgcctatttctgcatccctgtacatcctgactctcaattcttgtttttctttgaagatccttcgaacccaacatctcaattcacctggattgttataccccaagggttcagggataacccccatctatttggccaggcattagcccaagacttgagccagttctcatacccggacactcctgcccttcggtatgtgaataatttacttctagacgcccattcagaaaccttgtgccatcaagccaccaaagcgcttttaaacttcctcaccacttgtggctacaaggattccaaaccaaaggctcagctctgcttacagcaggttaaatacttagggctaaaattatttaaaggcactagggccctcggtgaggaaagtatccagcctatactggcttatcctcatcccaaaaccctaaaagcaactaagagggttctttggcataacaggcttctgccaaatatggtttcccaggtacggtgaaacagtcaggccagtatatacactaagtaaactcagaaagccaatacccatttagtaagatggacacctgaagcaaaagaggctttccaggccctaaagaaggccctaacccaagccccaatgttaagtttgccaacagggcaaggcttctctttatatgtcacagaaaaaacaggaatagctctaggaatccttacacaggttcaagggaccagcttgcaacctgtggcatacttgagtaagaaaattgatgtagtggcaaagggttggcctcattgtttacaggtagtgacggcagtagcagtcttagtatctgaagcagttaaaataatacagggaagagatcttactgtgtggacatctcatgatgtaaatggtatactcactgctaaaggaaacttgtggctgtcagacaaccatttgcttaaaaatcaggctctattaattgaaggactagtgctgagactgcgcacttgtgcaactcttaacccagccacatttcttccagacaatgaagaaaagagagaacgtaactgtcaacggtgattgctcaaacctatgtcactcaaagggaccttctagagattcccttgactgatccctacctcaacttgtatactgatgaaagttcctttgtagcaaaagggctttgaaaagcagggtatgcagtggtcagtgataatggaatacttgaaagtaatcccctcactgcaggaactagcgctcagttggcagaactaatagccctcattcgggcactagaattaagaaaaggaaaaagggtaaatatatatacagaatctaagtatgcttacctagccctccaagcccacacagcaatatggagagaaatggaattcctaacttctgagggaacacctatcaaacatcaggaagctattagattattattggctatacagaaacctaaagaggtggcagtcttacactgctggggtcatcaaaaaggaaaggaaagggaaatagaagggaaccgccaagcggacattgaagccaaaagagatgcaaggcaggaccctccattagaaatgcttatagaaggacccctagtatggggtaaccccctccaggaaaccaagccccagtactcagcagaagaaacaatggggaacctcacgacgacagtttcctcccctcaggatggctagccactgaagaaggaaaaatacttttgcctgcagctaaccaatggaaattacttaaaacccttcaccaaacctttcccttaggcattaatagcacctatcagatggccaaattattatttactggacaaggcctttttaaaaccatcaagcagatagtcagggcctgtgaagtgtgccaaagaaataatctcctgcactgcaggccatacatttcaattcctgtatctttaacctccttgttaagtttgtctcttccagaatccaagctgtaaagctacaaatcgttcttcaaatggagccccagatgcagtccatgactaagatctaccgtggacccctggaccggcctgcaagcccatgctctgatgttgatgacatcaaagccacccctcctgaggaaatctcaactgcacaacccctactatgccccaattcagcagaaagcagttagagcggtcatcagccaacctccccaacaggacttgggttttcctgttgagaagggggactgagagacaggactagctggatttcctaggccgactaagaatccctaagcctagctgggaaggtgaccgcatccacctttaaacacggggcttgcaacttggctcacacccaaccaatcaggtagtaaagagagctcactaaaatgctaattaggcaaaaatgggaggtaaagaaatagccaatcatctatcccctgagagcacagggggagggacaatgatcaggatataaacccaggcatttgagctggcaccagctaccctctttgggtcccctccttttgtatgagagctctgttttcactctattaaatcttgcaactgcaaaaaaaaaaaaaaaaaaaaaaaagtctgtaggtatgtgtttgcaggcacagtggccacatgttcaaagaaaaatagatgacaaattaaaaaaaatatttactcaggacccagatatgtatagattttatttacattcctatatgatttttattatgaccacaaaaatgacgctataataaagataacaatttagttttatatttcaaagtgactaaaagtgtagatttggattgcttgtaattcaaggaataaatgttgaaggtgaagaatccctcatttaccctgacgtgattattacatattttatgctggtatcaaaatatgctatatatggcagaaatatatctacacactatgtacccataaaagttaagaaaaataagtttaaatttgtcaaggcaaaaaaaaaaagaagtttaaataagattaaaagtataaaaatgtaacctacgagaacaatattctttaatttatttgcaggttaaagccactgaaaaaaagagattactagagatgttattccactcttaccaaatagtaaactgttgccatctcttacctacacccttgagtaaggtgggataggttaaagcgagtggcataataacacttcattgaatgtacaacagacttaacatgtcaaaaaatgtttaaaaaattaagtttacatataatctaaaaatttatgaatgtactacattacataaaagcacaactaatataatacatcactaatttaattttaattttaactaaaattttaaaatgtttttctcactataatgcacaaaaatatattcctcagaacacctacctcatacatcactcaatattttaagttaaccacaaaaagcctctccatttagatttttatcatgcattttatattttaatatcctttctcttttatgaaaaaggtcataaataatgcccatctaataaaaaagaatctttcatatctctgatgcagcaacaattgatcgcatgctttcacatgtaaataaagtaggaatgaagagcatgaagtaacttgagagttgaattacatccttatttgcttttcagagtctgtaatttttttcaatattgtgatgttaatttttttgatatttgaagtatacaaaaagtatacttcaaatgtaattataattctccaaaaaatcacctcctcttttttaagttatatgcaaataacttatctaaattttagattgaaattattttttttactcaacactctgatttagtgtagtctgaagtgccagtgccttatcatttctactgtgaattctctgacatttacagagttaattttggattgaatatttttcatatttactgcatctacaaaaaaaacttactctgttttctaagctgtagtttataaacttttttccaaatttattacatttgcaggtttttttctctattatacattccctgatattgaacaaagtttgagcaactttagggtttttctctagcacaaaatatgcacaataagatctgtgatacaaatatagtactacaaccgtctttatatttgtaatgtttgtcatcaaaagaaatactcttcaccattctaaggtttatattttctaaaagatattctcacagtaattgcatttttaatatttgttttaagtataaactctgtgatgttaagatgtgagcagatattaatggcttttccacattcttcataggtgtacattttttttcaagtataaatgctttcctatgcgataaggtgtgagtattggttaaatattttgccacattcttcatagttttctctaggataaattagcttatactcaagtgtgacaaccatttaaaggctttgtgacatgactcacatctagggcttcttgacactatgatttcttttatgtttagaaaagtttaaggtgttctcaagagcactgtcatgtcttttaggtttgtagagcttctctccagtatgatttgataacttattaaaaactttgccacattcgaccgggctcaatggctcatgcttgtaatcccagcactttggggcactttgggaggccaaggcgggtggatcacttgaggtcaggagttcaaaaccagcctggtcaaaatggtgaaaccccgtctctactaaaaatacaaaaattagctgggcgtggtggcaggcgcctgcaatcccagctgcttgggaggttgaggccagagaatcgcttgaacccaggaggcggaggttgcaatgaactgagattgcaccattgcactccaatttgggcgacagagtgagactccatttcaaaaaaaaaaaaaaaactttgccacattcttcacatttgtagaatttctctacaacataaattatcttatgtgtaataagggttgaaatgtttttaaagcttttgtcacattcttcatatttataaaatttatcttctgtatgaattctcttatatttagtatgagttgaagaccagttaaagactttgttacattcttcacatttgtcgggtttctcttcagtatgaattatcttaatgtgtggtaagatgtgagaaatggttacagtgtttgccacattcttcatatttgtagggctagtttccattatgaattatcttatgttcagtaaggtttgaggacgttaaaagctttgcaacattcttcacgtttgtagggtttctcttcagtataaattgtttattaagaattgaagaattaggctgggcacggtggctcacgcctttaatcccagcactttgggaggccgaggcgggcagatcaccagaggtcgggagttcgagaccagcttgaccaacatggagaaaccccgtctctactaaaaatacaaaattaggtgggcgtggtggcacatgcctatagtccctgctactcgggaggctgaggcaggagaatcgcttgaaaacccaggaggcggaggttgcagtgagccgagattgtgccactgcactccagagcctgggcaactagggcgaaactctgtttcaaaaaaaaaaaaaaaaaaattgaagaatgcttatggcattattcacatttgtagggtttctctcccattgaattatgttgtttagcaagagttgaggactggctaaaagcattgccactttcttcacatttgtagggtttttctccagtacgaattttcttatgtctaataaagtttaactgattaaaagcattgccacattcttcacatttctagagtttgtcttcagtatcaactattttctgttgagtaaggtctgaaaaccagttaaaagctttgccacagttttcatatttgtagggtttctcttcagtatgaattatcttatgttcagtaaggtttgaggaccagttaaaagttttgccacactcttcacatgaggcgggtttctctctaatttatcttatattcagtaagatctgagaacccgttagaagctttgccacattcttcacatttgtaaagtatctctccagtatgaattatcttatgttcagtaagttttgagaagcagttaaaagttttgccaaattctttaaatttgtagtgttcctctccaagataaattattttatgttgagtaaagtttgaggactggttaaaagctttgcccattcttcatatttgcagtgtttgtctctactatgaattatcttatgttcagtaagatttgaggactgattaaaagctttgccacattcctcacatttgaagggtttatcttcagtatgaattatcttacattcagtaagatttgaggaccagttaaaagctttgccatattattcacatttgtggagtttatcttctttaggaattctctcattttgagtaacagctgagcaatggttaaaagctttgtcacctttattatatttgtagggttttcctccagtatcaattattttatgtgtatttaaggtgtgaggactggttaaaggctttgccacattctttacatttgtggggtttctctccagcatgaattgttttctgcctattaaggcttgaggactggttaaaagctttgccacattcttcacatatggagggtctgtctctagtataaattatcttatgtgtattaaggtttgtaaaatggttgaaagctttgacacattcttcacatttttagggcttctccccagtatgaattatcttatgtttagtaagggctgaaagatggttaaaagctttgccacattcttcacatttgtaggttttccctccagtatgaattgttttatgttgagtaaggtgtgaggactggttaaaggctttgccacattcttcacatttgtagggtttctctccagaatgaattatcttatgtttagtaaggtttgaggactaaatgctttaccacactcttcacatttgtagggtttctttccagtatgaattatcctatgtttagtaaggcgtgagaaatggctaaaagctttgccacgttcttcacatttgtagggtttctctccagtatgaattgatttatgtttagtaaggtgtgaggattgcttaaaagctttgccacattcttcacatttgtacggtttctccccagtatgaattatcttatgtttcataagggtcgagaaattgttaaaacctttgccacattcttcacatttgtacggtttctccccagtatgaattatcttatgtttcataagggttgaggaattgttaaaagctttgccacattcttcacatttgtagggtttctttccagtataattatctcatgttttctaagggctgagaaatgcttaaaagctttgccacattcttcacatttgtagggtttctctacagtatgaattaccttatgttccataagttttgagaccacttaaaagctttaccacattcttcacatttgtatggtttctccccagtatgaattatcttatgtttcctaagggctgagaaattgctaaaagctttgccacattcttcacatttgtacgatttctccctagtatgaattagcttatgtttcttaagggttgaggaattgttaaaagcttttccacattctccacatttgtagggcttctccccagtatgaactgctttatgtctagtaaggtgtgaggactgcttaaaagctttgccacattcttcacatttgtatggtttcttcccagtataaattatcttatgtttcctaagggttgaggaattgttaaaagctttgccacattcttcacatttgtagggtttctttccagtatgaattatctcatgttttctaagggctgagaaatgtttaaaagctttgccacattcttcacatttgcagggtttctctccatatgaattaccttatgtaaagtaagttttgaggaccactgaaaagctttaccacattcttcacatttgtaggatttctctccagtatgaattatctcatgttttctaagggttgaggaattgttaaaagctttgccacattcttcacatttatagggtttctttccagtatgaattatcttatgttttctaagggctgagaaatgcttaaaagctttgccacattcttcacatttgcagggtttctctgcagtatgaattaccttatgtacagtaagttttgaggaccacttaaaagctttaccacattcttcacatttgtagggtttctctccagtatgaattatctcatgttttctaagagttgaggactggctaaaagctttgccacattcttcacatttgtagggtttctttccagtatgaattatcttatgtttcctaagggctgagaaatggttaaaagccttgccacattcttcacatttgtagggtttctcttcagtatgaattactttatgtctagtaaggtgtgaggaccacttaaaagctttaccacattcttcacatttgtagggtttctctccagtatgaattatctcatgttttctaagggttgaggactggctaaaagctttgccacattcttcacatttgtagggtttctttccagtatgaattatctgatgttttctaagggctgagaagtggttaaaagctttgccacattcttcacatttgtagggtttctccccagtatgaattgctttatgtctagtaagatgtgaagattgcttaaaagctttgccacattcttcacatttgtatggtttcttcccagtatgaattatcttatgtttcataagggttgaggaattgttaaaagctttgccacattcttcacatttgtagggtttctttccagtatgaattatcttatgttttctaagggctgagaaatgcttaaaagctttgccacattcttcacatttgcaaggtttctcttccatatgaattaccttatgtacagtaagttttgaggaccacttaaaagctttaccacattcttcacatttgtagggtttctctccagtatgaattatctcatgttttctaagggctgaaaaattgctaaaagctttgctgcattcttcacatttgtagggttgctttccagtatgaattatcttatgttttctaagggctgagaaacgcttaaaagctttgccacattcttcacatttgcagggtttctctgcagtatgaattaccttatgtacagtaagttttgaggaccacttaaaagctttaccacattcttcacatttgtagggtttctgtccagtatgaattatctcatgttttctaagggctgacaaattgctaaaagctttgccgcattcttcatatttgtagggtttctcttcagtatgaattatctcatgttttctaagggttgaggactggctaaaagctttgccacattcttcacatttgtagggtttctttccagtatgaattatctgatgttttctaagggctgagaaatggttaaaagctttgccacattcttcgcatttgtagggtttctctccagtatgaattgctttatgtctagtaaggtgtgaggattgcttaaaagctttgccacattcttcacatttatatggtttcttcccagtatgaattatcttatgtttcataagggttgaggaattgttaaaaactttgccacattcttcacatttgcagggtttctttccagtatgaattatcttacatttagtgaacattgaagagatgttaaaagctttgccacatttcttatatttgtagggtttgtcttcagtatgaattatcttatgtttaataagggttgagaaccatttaaaggctttgccacgttcttcacatttgtagatattctctctagtatgaattctcttatgttgaattaagtgtgaaagcatgaaaaatgatttgctacatttcatacatttgaaagttttctttttagtgtgtctaatcttatatctatttgaatttgaatatttatgaaagactttcacatatttgttacactgaaatatttttccctgggtagttgtccaacattggttaagtttattataagcttcttcgtgcatcttaccctcattgacactttcacaatcttttcttaatcgtaaattcttatgtccacatcttgcatatgttctcaatattatttcttggaaagaatcttttatgctctgatctggccaaaagtcttgtgtaaaatgagaactaataactggaagaaatgaaaataataaattatgtcacttgctagactcagatgaatatactttacaaatctaacctataaaattatacaaaccgcttaagcaagatggcacagcaaaataagacaggccctaatttcttcatagacatataaatgtaataaaaacatactgaccaaaatatatttgttgaaaatttataaataagttaagtgtgtagagtgccccaagtaagtacaatgcaaacagccacataaaaggaaagagaagtctgttacagtttcccaactcagctcttcctgctccccaaaatgacatggtgtcgttagaagtaaattgctggctgggaatggcagctcacacctgcaatcccagcacttttggaggctgaggcaagtggattacctgagatcaagggttcaagaccagcctggccaaaatggaaaaactccatctctactaaaaattcaaaaattagccaggcatggtggcacacgtctgtagtctcagctacttgggaagctgaggcaatcacttgaacttgggatgtagaaattacagtgagatgagattatgctattgtactccagccagcgtgacacagtgagactctgtctcaaaacaaaaaaagtaaattgccatctcctgatttcatttctaaagacatataaaacagtggcacatacatatttatttctggcttctaggggcctttccagactggtttatgtttctcatgacacaaagtactgaaagaaatggtggcatactttaaaatgacagcttgaggccgggcacggtggctcaggcctgtaatcccagcaccttgagaggcctaggtgggcagatcacgaggtcaggagatcgagaccattctggctaacacggtgaaaccgcgtctccactaaaaatacaaaaaattcgccaggtgtggtggcgggcatctgtagtcccagctactcaggaggctgaagcaggaaaatggcatgaacccgggaggcagagcttgcagtgagccgagatcatgccactgcactccagcctgggcgacagagagagactctgtctcaaaaaaaaataaatgaataaaataaaatggcagcttgaatctgctgaaaccaaagttaaatattacagcagcagagaatgtagtaccacacacaaaaaatagattactattgagaagaaacatgagtaacattctttatctaaaaaaaaaaaaaaaaaaaaaatttcaaacaagatgcattctaagaacatgtttgacatactcccagaatctctagccaagacaattggtttcagatttccaggacaaggctacattatgaagactgtaacaggtagcttttttgatgtacaaattttaattaattattataatgtatatggaatactagggcaacatggcccaatcaaaaaaagtataaaatttttggaaaacaaccataaaacaatgaagattaataaattaatttttaaaatttcaaataaattaaataatactgaataagagacataggaacacagaccactataaaaaattttaaaaatgaggatacctcttcccctaatggcgtgaggtaattcatgaaaatggcttgctattcacctaagccagagaatcccgcaatatcatgctaaacaagaggttcataagagctattcttatataagacaaaataaactttaaagcaacagcagtttaaaaaaacaaagagggacattatacaatggtaaaaggtcttgtacaacaggaacatatcacaatcctcaacatatatgcacctaacactgaagctcccaaatttataagacaattactagtagacctaataaatgagatagacaccaacacaataataatgaggacttcaatactccactgacagcactagacaggtcatcaagacagaaagtcaacaaataaaaaatggatttaaactataccttggagcaaatgcacttaacagatatatacagaacattccatccaataactgcagaatatacattctactcaacagtgcacgaaaccttctccaaatagaccgtatgataagccacaaaatgagcctcaataaatttaagaaaatgaaattatatcaaacactctctcagaccacagtggaataaaagtggaattcaactacaaaaggaaacttcaaaaccatgcaaatacatgtaaattaaaaaacctgctcctgaataatcattgggtcaaacatgaaatcaaaatggaaatttaaaaattcttcaaactcaacaacaaaagtgatacaacctatcaaaacctctaggatacagcaaaggagatgctaaaaggaaagttcatagtcctaaacacctacatcaaaaagtctgaaagaacacaaaatgacactcttgttcacacctcaagaaactagagaaacaaggacaaaccaaacccaaacccagaagaagaaaaaaaaatagtcacagtcagagcagaatgaaatgaaattgaaacaaacaaacaaaaaccaaaagataaataaaacaaaaacctggctctttaaaacgcataaatacaattgatagaccattagcaagattaaccaagaaaaaaagaaaatccaaataacctcaataagaaatgaaatgggagatattacaactgacaacacagaaatacaaaagatcattcaaggctactatgaacacctttaagtgcactaactagaaaacctaaaagaaatgaataaatttctgcaaaaatgcaacccacccagcttaaatcaggaagaattagataccctgaacagaccaataatgagcagcgagattgaaatggtaatttaaaaattaccaagaaaaaaatgtctaggaccagacagtatgcagcagaattctaccagacattcaaagaagaattgataccaattctattgacactattccataagatagagaaagagggagcccttcctaattcattctatgaagccagcatcaccctaataccaaaaccagaaaaggcattaatcaaaaaagaaaaccacagactgacgtccctgatgaaaatagatgctaaaatccttaacaaaatactagctaactgaatccaacaacatatcaaaaacagaatccatgatcaagtgggtttcataccagtgatgcagggatggtttaacaaatgcaagtcaataaatgtgatacaccacataaaaagaaataaaaacaaaagtcacaggatcatctcaatagatgcagaaaaagcattcaacaaaatccagcaacgctttatgattaaaactcttagcaacactggcatacaagggacatacatcaagataataaaagccatctatgacaaacccagagccaacataatactgaatgaggagaagttgaaagcattccctctgaggactggaacaagacaaggatgcccactttcaccccacttcttcaacatagtactggaagtcttatccagagcaagcagaaaagagaaaaaaataaagggcatcaaaattggtaaagaggaagtaaagctgtcactgtttgcggatgatatgattgtttactttgaaaaccctagacttttcaagaaagctcctagaagtgataaaataattcagcaaagttttcagatacaaaattaatgcatacaaatcagtagctcttctatacaccaacagcgacgaagcagagagtcaaatcaaaactcaaactcttttacaatagctgtgagaaaaaaaaaaaattaggaatatacctaaccaaggaggtaaaagacctctacaaggaaaactacaaaacactgctgaaagaaatcacagatgacacaaacaaatggaaacagtccacgttcatggataggtagaatcaatattgtgaaaatgaccacactgccaaaagcaatctacaaattaaatgcaatttccatcaaaataccaccgtcattcttcacagaattagaaaaaattattctaaaatccatatggaacaaaaaaagagcctgcatagccaaagcaagactaagcaaaaagaacaaatctgaaggcatcacactacctgacttcaaactatactataaagccatagtcacaaaaacagcatggtactggtataaaaataggcacataaaccaatggaacagaatagagaacccagaaataaacccaaatattacagccagctgaacttcgacaaagcaaacaaaaacataaagtagggaaaggatactcttttttttttctttccttttttttttttttttttttttgagatggagtcttgttctgtcacccaggctggagtgcagtggtgtgatcttggctcaccacaacttctgcctcccgggttcaagcaattctcctgcctcagcctcccaagtagctgggattacaggtgcctgccactgcacctggctaatttttgtatttttagtagagatggggtttcatcacattggccaggctggtcttgaactcctgacctcatgatccacccgtctcagcctcccaaagtgctgggattacaggcatgagccaccgcgcctggccagggactcttttcaacaaatgatgctgggataattggctagccacatgtaggagaataaaactggatcctcatattttactttatacaaaaatcaacacaagatggattaaggacttaaatctaagacctgaaagtataaaaattctagaacattggaaaaacccttttagacattggcttagacaaggatttcataatcaagaacccaaaagcaaatgcaattaaaacaaacataaattagggagggttttctctctatcttgtggaatagtgtcaaaacagggacttaattaaactaaagagcttttgcatggcaaaaggaacaccagagtgaacagacaacccacagagtaggagaaaatcttcacaatctatacacctgacaaagaagtaatatcttgaatctacaatgcactcaaacaaatcagcaagaaaaaaaaaaatcccatcaaaactgagctaaggacacaaatagacaattttcaacagaagatatacaaatggccaagaaacatatgaaaaaatgctcaatattgctaatggccagggaaatgcaaatcaaaaccaccaaaggataccaccttactcatgcaagaatggccataataaaaaataaataaataaaaaaacagatgttggtgtggatgtggtgatcagggaacacttctacactgctggtgggaatgtaaactagtacaaccactatggaaaacagtgtggagattcctaaagaactaaaagttgtactaccatttgatccagcaatcccactactgggtatctactcagaggaaaagaagtcattatatgaaaaagatacttacacacacatttatagcagcgtaattcacaacagcaaaatcatggaaccaacccaaatgcccattaaccaatgagtggataaagaaactgtgagatatatatataatggaacactactcagccataaaatggaataaattaatggcattcacagcaacatggataagattagaggctatccttctaagtgaagtaaatcagaaatggaaaaccaaacatcgtatgttctcactgatatgtgggagttaagctatgaggatgcaaaggcataagaatgacacagtggactttggggacttggggggaagagtgggaggaaaacgagggataaaagaccacaaatagagtgcagtgtatacagctcgggtgatgagtgcacaaaaatcccacaaatcaccactaaagaacttactcatgtaaccaaacaccacttgtacctcaataacttatgaaaaaataaaataaataaaaaaaaataaagtagtacacaggttacttgaagacgaaaaaaaagagctttccaaattttgatgtaataaaaaaaattcttaatccataatacttgatcagaaattattttactttaaaaaacaataaaaaataaagactttccaaaatgaaaggtaagggtgttcatcaccactagcacagttaaaaaaaaaagctacatggtggccaggcacagtggctcatgcctgtaatcctacacctttaggaggccaaggtagtcagaaaacttgagaccaagagttcaagatcagccccaaaacagagtgagactgtgcatatataacaagagaaatgctaaaatgagtcttttatgttgaaaaataaaatgatgctagacagcatcaaaaaaccgtatatgaatatatagctttctattaaatgtaaacatacagacacatataaaatgtcttactataataataggcataatacccttaaaattcttctatagaatataaaaacaaaatataaatctgcataaatctgaatacacaatataaaataatttgtaatattaataacaaacttgaaaatatagaaatatagtttttgtattcaattaagttgttatgatattaaaacacattgatttaatcttaagatgttttacataatgtccatttttcaacataactacaaaaattttatagaaactacgcaaaacaaaataaaaaaaataagcaaagtgtgccactacaaaattaaacaaaaaatagttaaacaagaaatgagacaaaatatgtaaaaaaaaaaaaaacataaaacataacaatgaaactggtatgtaactttatttcttttcttttctttttttttttgagatggagtctcgctctattgcccagggtggagtgcggtggcacgatctcagctcaccacaacctacgcctctgggttcaagtgattctcctgcctcagcctcccaagcagctaggactacaggcacgtgccaccatgcctggataatttttgtattttcagtagagacggggtttcattgtgttggccaggctagtctcaaactcctgacctcgtgatccacccacttcggtctcccaaagtgctgggattacaggcatgagccaccgtgcccggcataactttatttcttatttctttttttttttttgagtcggagtttcactgttgttgtccaggctggagtgcaatggcgccatctcggcttaccacaacctccgcctcccgggttcaagcaattctcctgcatcagcctcccgaatagctgggattacaggcatgcgccaccacgcccggctaattttatatttttagcagacatagggtttctccatgttggtcaggctggtctcaaactcccaacctcaggtgatccgcccacctcggcctcccaaagtgctggaattacaggcgtgagacaccatgcctggcgtaactttctttaagaaatcattttaaatataaatttatcaaactacttaataaaaagaaatgtaattccaggactttcggaggccaaggtgggctgataacttgattccaggagtttgagaacagcctgagcaacaaagcaaaaccctgtctctaccaaaaaaaaaaaaaaaaaaaaccaaaaaactagctgggtttaatggcatgggcctgtaacccagctacttaagaggttgaaactagaagattatctgagtttgagaggctgaggctgcagttcactgccatgattacaccattgcaaaacagcctggttgacgaagtgagaccctatttcattaattaattaattaaaaggaaaagaaagaagatgcctgagtggcttaagaaaagaagcatacaatatgttctctacaagagaccaattttagcactgagtcaaatagtctgtaagtaacagaatttaaaaaaatctatatttcatgcaaatagtagccacaattgggtgaggtagtcgtaattatattgggcacaatatgctttaagtcaagtactagtacaagaaaaagattgatattatataatagtaaaatgggtcaatttaccaggaatctataactattatatttatatgtacaggtaggtataacaacaggcctccaaaatatataaatattgacataggtgaagcaagaagtacatagcaacataacagttgcagacactgagaccccattttcaataataatagaaaattcatatagaagattaagaaaatagaaaatgtagataacattatggactgtaatattttacatacagagaaatatctgagagtaaataatttataacagaaaagtttatttggctcacagttcaacagactgtacaagaagtatatgccggtatctgtttctggtgtgttctcaggaagcttatgatcatagtggaaagcgaagagaaactggacatatcacatggtaagagatagagcaagtgtgaggtaaaagagccaggttttttaaaaatagtttctcaaaactatacagatatttgtgtgtccccaatatggaaaagcagtcagattgtgcagtcccttatatgccatgaacacaactttggctctcactgtaaacttgaagggaaattaccaaaacgaaaatagaatccttagagaattttaaagcataagacagaagatgccctacatgagagcaaaattttaaaaaatctcagtcttcccagaaactacttcctttggagcacagcttctcaggtcacattttgagaactggctttctcctggacctctggacctcttatttgtgttgtttcttgtattcactctcacatacctgggggtttagttaccatctcatgtctcttcatattccaaggctctttcccttgcttcagacaagttatcaagtctagcttagagacagcgatacctgttttattaaaaataaataacataaatattgctcatattccccaaataatgtgctcattaaagagaatgtaatagaatattctagtaaattgatccctcaatactaatttataacataaatttctaaatatttagaaaatattttcaatttgtacagtcccttaattttactacctggtactactgaatcaaatattggtggtggcaatgagatttcaaggtgtggcaactacattttatgccactaaatttcttcaattttcactaatctagagtgaaaaatgcagatctgcttagaaatgtggaaagttcaggtaaaaattaaacatctttaaaaaattcctttctggccgggcatggtggctcacacctataatcccagcactttgagaggccgaggcaggtggatcacctgaggtcaggagttcaagaccagcctcaacatggagaaaccccgtctctgctaaaaatacaaaattagccgggtgtggtggtgcatgcctgtaatcccagctactcaggaggctgaggcagaagaattgcttgaacctgggaggcggaggttgtggtaagccgagatcgcaccattgcactccagcctgggcaacaagagcgaaactctgtttcaaaaaaaaaaaaaaaaattcttttctacactttcaaatccctgttttcagaaaacgggtatctgaaacttatttatgctaagcataaatcaccaaaacacatcctacagaaaagagaaatgaaacctatagaatataataggaattgcttaattaaaatcatcctcacccaggaagaccaggtttctgtagttctctaacataacattcctatataaattctgctgagccatgtccaggcattgccactcctccagagcgaattctatggtcacatcccaaaatgtcaacgatccctgaaaaacacaacaaagatacatatagatttcccaattggccatggacagaatttttaatttgactcaaggtgaaatgagagagtaaagagaacaggttctaacttacagggatgactgaacgtattcagtaaaataattttcaacacagaaatcgtctcggctgggcgcagtggctcatgcctgtaatcccagcactttgggaggccaaggcaggaagatcacgaagtcaggagattgagaccatcctggctaacacggtgaaaccccgtctctactaaaaatacaaaaaattagccggcatggtggtgggtgcctgtagccccagctacttgggaggctgaggcaggagaatggcatgaacccgggaggcagagcttgcagtgagctgagattgctgcactccagcctgggcgacagagctagactctgtctcaaaaaaaaaaaaataaagaaaagaaaaaaagaaatattctctaatgtattctcaaactctgagaaaaaaagaatggcagaagatccacaacaccagcacagacaagatacttttctggataataaagtataaaattaagggcatgataacatgtacatttttgagtgctatttttaaatcatacagaataagtcttgtacatttttcagaccaaaaagacatgttgagttagaagacacctctcaaattttaatgtgtacaattaactggagatcttgttaagcatatttattttataagatctggaataaagtctgagtttctgaatttgacaagctcaccagtaatgcctgtttttggccccaaaagaatcttttgttaaatattcagcaagtggaggagcctgtatttttcccagtttttctgccctataaacaaagacgagagccctcattttccaaagatagatatatgcagagaaaatctaagaaaggcaggtgccagattaaatgtgatcattggtgcacatcagctacataaagatacttaataacgaggagaaaaatagttaactctatactgaaaaaacctgtcagacagctttttttttttttagacagagtttctctcttgtcaccaaggctggagtgcagtggcgcgatctcgactcactgcaaccttcgcctcctgggttcaagcgattctcctgcctcagcctcccgggtagctgggactacaggcgcgtgccaccacgcgcagctaatgtttgtatttttagtagagacagggtttcaccatcttggccaggctggcttcaaactcctgaccttgtgatccacccacctcggcctcccaaagtgctgggattacaggcataagccaccgcgcacagctcagacagcactttaatcaagtcaatcattaacatcaactgcagtaggacaaatttttatgatgtgctgatgcacacagaagggcacacagaaggacacagcattactgctgtgatattgctcccccaaagtaaattataatctgaatttaaccataaagaaacatcagtttatgcaaatgtcaagacacagataactcccattttttgtaacttttaatagccattttaagcagactttctttagcacactagagagcaggtatctcctaaccatttttttcagaactttttttttttttttgagatggagtctcactctgttgcccaggcgggagtgcaatggtgcgatctcagctcactgcaacctccacctcccgggttcaagcgattctcctgcctcagcctcccgagtagctgagattacaggtgccccacaccacgcctaggtattttttgtatttttagtatagacggggtttcaccgtgctggccaggctggtctcgaactcctaatctcaggtgatccacccgccttaaagtgctggggttacaggtgtgagccactgcaacttgcctttaaaaagcattttctttttttttttttttttttttttttttgaggcagagtcttgctctgtcgcccaggctggagtgtagcagcctgatctccgctcactgcaagctcggcctcacggattcacgccattctcctacctcagcctcccgagtagctgggactacaggtgcccgccaccacgcccggctaattttttgtatttttagtagagacagggtttcaccgtgttagccaggatggtctcgatctcctgacctcgtgatccgcctgccttggcctcccaaagtgctgggattacaggcgtgagccaccgggcccagctaaaaagcattttcttaaagctgttctgcatagagctaatggagaacacagatggagcctcaacattacatgttctactttttccgtaaggaccccagcttttccccaataggaatcttgagtatccacaccttcccctattcaacaaccacaggtgaaactttttttttttttttttttttgagacggagtcttgctctgtcacccaggctggagtgcaatggcaccatctcggctcactgcaacctctgcctcccgggttcaagcgattctcctgcctcagcctcctgagtagctgggattacaggcgtgtgccaccacgcccggctaatttttgtatttttagtagagacagggtttcaccatattggccaggctggtctcgaactcctgaccttgtgatccgcccgcctcggcctcccaaagtgctgggatcacaggcgtgagccaccgcgcccagcctgctctggcacattctaaataatatgtctacctaggaaaaatctgaggaaacatagatataagttgaccgtttatttgggccaagcttgaggactgtaacctgggagcaaatattcaagttgcctgaaatatatacttgattagcagtgtgattacaagttgatttgtaaaggctaaaaaagatggacagagagtgagttgatacaaagttgtctgtcagaaatttttatttatttacaggaataacattgattattgattggatatacaccattagtttttaggtacaagttatagtgtccagtgtggcattattaatatatagctacttgtggcaatagtgaacagcttcaaaagatgaatacatagtgcaaaaaacaaaaagaaggtcgggtacggtggcttgcgcctataatcccagcactttgggaggcgggcagatcacctgaggttgggaactcaagatcagcctgacaaacatggagaaaccctatctctactaaaatacaaaattagcctggcatggtggggcatgcctgtaatcccagctattcgggaggctgaggcaggagaatcacctgaacccgggaggcaggggttgcggtgagccgagatggtgccattgcactccagcctgggcaacaagaacgaaattctgtctcaaaaaaaaaaaaaaagacagagagaaagagaattctactctcattttagtgtctctataagtttgacaactaaaaggacttgcatctctcagaaagaaagtttttcttttttctcaaatctgaaaacctggattcagaatttgaagttgcagttttaggtcctgaatggatggagtagcagcaggtgttccctgcacatctgtgggcattttaacaagaggaagaaaaaggaagtagagattcccatgtgtacatgtctactcaatgcacacatgttactgtgactgggtttctgggccccatggtctgtgaatcagtttcagatgtgaagatacaagagtcactgaaaaaggtaaaacggctgtttgctgccctgtgaagtttgtagaattctgatctagcctctctaaaagttactgtggaggactatagataccaaattggcagagaaacaattctgcctgcatatttaggggacagcatgcactttgcagcacaattgtgagttgaatgatagcctgagagggaaagtttcctctagcttaaagcttgggtggcaccttatatttttgtaacatgtctgataattctagagtttttgtgaaacataaaagacaaattttcttcagccccggagaaactccacaataatagaacagacataaaactgttgtattacacaattaaacctgaacgtgacatgcatcacagtcagtctgcttaagagactgcaaagacaaaaggatggtcaccttaattagttaacaagtagaaaatttatagcaccatgtcatacatagttattcctaaattcacctggtaattgaaaaggctagccatgtaggctaatcagttatgttcaatgacaaaataaacttttcatatcttcatgaaaggaggtaattttgcaacttgaagccaggtgcctgctgaaggtaggctctcaatctcctacaaaaatggttgaatagggtgctatctttttggctatttatattttaaagcaatggctctctactccctgagcactggggctactcctctcccgcttgcactctcctgttagctggtgtcctctcttgacccctaccatctgccattgaggcagagctcacagctgaaagctcacatcttacataaaccacaactgccacagcagcactccagtgacacctcagagagggaagcctgagctgcaggagaaaagcctgcaggcctcctggggagaactgcaccttcacattaatggaaattggaacagtaattcagcctcagtttttatttacaatggtgacatggaaaaaccactgctggatttccaacatgagtccagacagagatagctccaaaagttcccactgtgacagcccacctcttttacagacaccagggaatacttacaatgcagacacccaaagcactggacagaaaaacagctctcagtctgagcaagattatgctgagaggaaaaaagaagttaaaaccatcttaggtaaaaactcagtttagacgtaagattgatcaagtcagccagaaaatactatcttaaaaagaatttctctctcaacaagcaaaatacacaactactctcagcatgagaaacatgagcattacgaagaaaaggggcatattctcagcagaattttagaaggtttctcttccatctctgctgctctctcatctcctagccattgaatgggggttccatattgaaatacatctcacaatttccaccagcactttttgatgaagatttataatctgactttgttcatatactggaatatatttaagcttgccacatagctaactaaagagctattatggtttttgggtggccacatcatctgtgtttatttgtcctgtaatagcagcattccgatttagtgaaatgaaagacactattaacaggccaggcacagtggctcacatctgtaatcccagcactttgggaggccgaggtgggtagatcatttgaggtcaggagttggagaccagcctggccaacatggtgaaaccccatctctactaaaaatacaaaaatgagctgggcatggtggtgggcgcctgtaatctcagctattcaggaggctgaggcaggagaatagcttgaacccggaagacagaggttgcagtgagccgagattgtgccattgcactccagcctgggcgacagagcgaggatctgactcaaaattaaaaaaaagaaaagaaaaagaaaacaaaagtcagagataacacaaataaatggaaaaccattttatgctcataggtagaaaagatcaaaatcattaaaatggccatactacccaaaaacggaacagatttaatgctattcttatcaaactaccaaaaacatttttaacagaactataaaaaactattttaaaattcatatggaaccataaaagagcctgagtagccaaggcaatcctaagcaaaaagaacaaagctggaggcattacattacctgacttcaaactatgcaacagggctacagtaaccaaagccacataatactggtacaagaaacagacttatagaacaatgcaacagaatagagagcccagaaataatgccacagacctaaaaccacctgatctttgacaaaactaataagaggaatgtgggaagaaatccctatttaataaatggtactgggaaaccacctagcagtatgtagaaaattgaaactggaccccttccttacatcatatacaaaaatcaactcaagatgaattaaagccttaaatgtaaaacttgaaattataagaaacccttgaagataacctagaaaataccattttacacatgggaactaactaagattttatgatgaaattaccaaaagcaactgcaacagaagtaaaaactgacaaatgggacctaattaaattaaatatcttcttcacagcaaggaaatcatcaacagagtaaacacacaacctacagaataaaagaaaatatttgcaaactatgcttttgacaaaggtctagtatctagaatccataaaaaactgaagtttacaagaaacaaacaacctccttaaaagtaaacaaaacgcagccaggcgcggtggctcatgcctgtaatcccagcactctgggaggctgaggcgggtggatcacctgaggtcaggagttcgagaccagcctggccaagagggtgaaacccagtctttactaaaaacacaattagctgggcgtggtggtaggcacctgtaatctcagcttctcgggaggctgaggtaggagaatctcttgaacccgggaggcagaggttgcagtgtgccgagactgtgccactgcactcgagcctaggcaacaagagtgaaactccacctcaaaaacaaaacaaaacataacaaaaacctagtagacaaaaggctaagagtaagattaaaggctcacgcctgtaatcccagcatcttgggaggccaaggagggaagatcacttgagatcaggagtttgagaccagcctggccaacatggttaaacctcatctctactaaaaataaaaaaattagctgggtgtggtggcaggcgcctataattccatccactcaggaggctgaggcaggagaatcacttgaacccaggaggcgaaggttgtagtgtgctgagattatgccactgcgctttagcttgggtgacagagtgaggcttcatctcaattaaaaaaaaaaaaaaaagtaaacaaaaaacatgagcaaactttttccaaaataagatatatatatatatatatatatatatatatatatatatatatatatatatatatatggctaacaagcctatgaaaaaaatactcatcactacagaaaagcaaagaaaaaccacaatgatataccatctcatatcagtcaaaatggctattactacaaagtcaaaaaataacagatgctggcagttgcagagaaaagcgtatgcgctgctgctaggagtgtaaattagttcaaccattgtgaaaagcagtgtggcgattcctcacagaactaaaagcagaattaccatttgacccggcaacctcataattgggtatatacccaaagaaataaaaattattctgtcataaagacacatgcacatgcatgttcactgaagcactattcacaatagcaaagacatggaatcaaccgaaatgcctatcaatggtaaactggataaagaaaatatggtacaggtaaggtttggtggctcatgcctgtagttccagcactctgggaggctgaggcaggtaaattgcctgagctcaggagttcaagaccaccctaaacaacatggcaaaaccctatgtcaacaaaaaatacaggaagaaaaattagctgggcttggtggcacacacctgtagtcccagctagttagggggctgaggtagaagaactgtttgagcccgggaatttgaggctgcaataagccaagatcatgtcactgtactccagcctgggtgacagagacccattttcaaaaaataaaataaagtatttagcaaaaacaaaacatggtatataaacatcatggaatactgcattgccataaaaagtgaacaagattatgtcatttgcagcaacatagatggagctggagaccattatccttagaaaactaatgcagaaagagaaaaccaaatgcatgctctcatttattagtaagagctaaataatgagaacacaaagaggggaacaacacacacccttctagttaagggtggaggacaaagaggatcagaaaaataatacctgtgtggtgctgtgcttaatacctcagtgacaaaataatctgcacaccaactcccgacacaatttcctctatgtaacaaacctacacatgtactcctgaatcaaaaataaaagttaaaacaaaaaaactctatgggtgaaagagagtgcaatgcaggtggaaggactggtttgtgctacagatagtggcccaggtacggctctactctgattaatttttgggttcatgctggcagatgatattatgaacaggttgtccagaacctcatgttggtggaaaaaacatgttgctgctgcagattcagtgtctggggttgggatatgccaggagacttgtagacacttgagtgagatttggcaggaaacactaggatcaaaaatgctgtagtgaaattcctgagggtggtaactagttctaagaggggtgtggataagccagtgtccagtggatatgcttgtaagaaggtgggaatcctgtgatggcagcagtggaaaaaggcggtctgttcgcatattctcactcataggtgggaattgaataatgagaacacttggacacagggtggggaacatcacacaccagggcctgtcgtggggtggggggaggggggagggatagcattaggagaaatacctaacgtaaatgatgagttaacgggtgcagcacaccaacatggcacatgtatacatatgtaacaaacctgcatgttgtgcacatgtatcctagaacttaaattaaaaaaaaaaagaaaaaggcggtctgttattagaacttttttcctcttttttatcctctctcaccctgggaggagacctgaaatcacagggtaatgggcagtgtgatggcctgtgtacagaaaagcagagcctcccattcctagacacccagagatccattccagaccaggcctctgtgatatctctcagctggaaccaaatttgtagagtttgctaaacaccaagcaattctcccacaccaactcactgtctgacattctccaacaccaactcactgaattctgacaccacccagagtcagcacacaccctgattcagggctcagtctcacaacattgttcttactgaaaaagccagtcacaaaccccatgggcccatctttgcttctgagctactgtttaaaaactggggactctcataacattcctcaaattcaataattttatagagctagtcacagaactcaggaaaacactgtagttacatttatcagtttattagaaaagatacaatccaggaaaagtcaaatggaagaaatgtataggacaaagaaaagatgtggggaggctgagcacggtggctcacacctgtaatcccagcactttgggaggccaaggtgggcgatcacctgaggttgtgagttcaagactggcctgaacaacatgaagaaacctcgtctctactaaaaatacaaaaaaattagctgggcgtggtggtgcctgcctgtaatcccagctactcaggaggctgaggcaggagaatcgctccaacccaggaagtggaggttgtggtgagccaagattgtgccattgcactcaagcctgggcaacaagagcaaaactctatctcaaaaaaaaaaaagaaagaaaagaggtggggaaagataaagcatatagataatcctggtaaatagctgtgattaataaaattctctatcctttgtgtgctccaggaacagtttctggaaagaaacacccttcccattatgacttcgatggtgctctcttttcttacctatcacatagccagacacagactctgcacattgtctcctttttctcattaaaaaataaataaataaatcgggccgggcgcggtagctcatgcgtgtaatcctagcactttgggaggctgaggcaggcggatcaaaaggtcaggagttcgagaccagcttggccaatatggtgaaacacggtctctactaaaaacacaaaaattagccaggcatgatggcagatgcctgtagtcccagctcctcaggaggctaaggcaggagaatagcttgaacccgggaggcggaggttgcagttgagtcaagatcgtgccactgcactccagcctcagcaacagagtgagactctgtctcaaaaaataataataataaaaataaataaataaatcagctgagtttgttttcagtggtcaacctaaaatatttcttaatcaaacattacttatttaaacaggcttctgaactttgagctaccctcagtctgagtcaacatacaaccttatttttatgtagttcctaagtacatgatgacttcagtgtaaaacattctctgatctaaaatctctttctttcaccctccattcgccatcccctccgacctcctctctaatatggtttgctcttccatatgaaacaaggcccttgtctgcctaaacttagcaatccttaaagatcttatagttggtatttcctcctgttgcaatacccttttggaattcaattcttttttcaacataaatctaacttcgttttattttacaaagtctagaaactatctcaaaacaataacaatttcatcttcagtaagaccctcccaatcccctttcatcttaaccttaactgcatctgcctgtgggtccccagctttccagggttctgtggcttccctcaggataaagtctccttccatgactggggtgagcaggctgggatatctgcagagaagactccccagaaaaaactaactgatcctttaataacctccttttgcaggctcagtattagccttagcttagagtcactgggctcaggctttaatcttcatgtcagagttattcccttggtttttgaaagtaagtgttcgaaaaattcagtgcaattactctaacacagtgttcatataagggaaggaaattttaaggtgcttacactttatatctcaataagagaaacaaaagtatctattcttttcagacaataaatgtattattttactatttccattaaaaatcatgtagtaggccaggcgtggtggctcatgcctgtaatcccagcactttgggaggctgaggcgggcggatcacctgaggttgggagttcgagaccagcatggccaacatggagaaacccccgtctctactaaaaatacaaaattagcggcgtggtggcacatatctgtaatcccagctactcgggaggctgaggcaggagaatcacttgaacccgggaggcagaggttacagtcagccaagatcgtgccattgcactccagcctgggcaacaagaatgaaactctgtttcaaaaaaaaaaaaaaaaatcatgtagcaaacaattagtcatatggaaacatttctagaaggtacaaagtttcagcatgaaactcagatagcaaagtaataggatacagaatagagatagtcactgttacaaatttaccctgcaaaaggaggaactgatgttttcatgaatctaaggaactcaccaattaccaccttttcttgtggaaatatgtgcattttctaaagccaaaatggaagagagattttccctatttttcttccttggtagcatttgaaaagtcaagccttgaaattctgtttaaaatcacccaaccataaaaaacacaccagagaaaattcctaaagtcattctgggaaaaaggtaaatgaaaatttttaacaaatggaatatacaattcaatattaattttattctgaaacccatctcttttttgcccttggttaagtattttcttacctttcaatccctactaacaaaatgcaatttacagttaaaaaactgaggtcaaaataagtgaacaaatcttttcaaggtacagatgtgtctgattcatgtgtcaagtcaggccatccaatcacttaagagattctcccaccccattctcctcacttaagtgcccaataactccttctcaggagactctgaactatgccccagtgagtgccccaggtaagaacttttcaagttcttacaccatctcattggggtcactttttttttttttttttttttttgtcgtttgggacactatttttgatttcacagattctcactatttttctttcactattttttcattatatttcactattgttctgctcccttaaagaatgcagggggcagaaattatttctgtgttttccccgcaataccagcatctgattggctgaccagcaatgtgtcttcaaaaaatggaagctgggttgggtgaagacaatcttaatgtctcaagggttagcttttcaaaggaagagtataccaggagagacctctcaaccccagggcatctgccttcttcgttgaaaggctacactccacacctcaggttgtcctactggagaaaatgaccaggagctgatattcactagacactctagcagacatagccatggggaatattttagctaattcccagacagtactgaaacccaggaccagggaaaaaactgaagaatggctgaaaacacatcataaagtttccaaaggaaaacctttacctttaccccaaaacattctgctaaaatctgtggagcaaggaggaaaaaaaaaaagcggcacaaagattttttacaacacagtgtcaggggattattttttgctttcttctcttaggaaatattcacaaacagaaaacaaatattatgaaaagtaccatccaatgctttgttaaaaaataaaatacagtatcaaaatgtacactaaggacaaatagtaatgtgaatcagagagggaaaattgacattatgaactggaagtttagtattttattgcaagccagagttaggctgcaggaattggggtttgggagtagacataatactctgcttgagatacctgtaaaaaatggaggggaaaatcagtcatctgaggagtgtgaaaataattaaaaataattaagtggcaggcaaatagactgaggtggctctagtgcctgatatctacttttttttttctttttttttaagacagtttcggtcttgttgcccagaatggactgcaatggcgcgatctcggctcaccgcaacctctatctcccgggttcaagcaattctcctgcctcagccccacgagtagctaggattacaggtacaggcatgtgccaccacacctggctaatttttgtatttttagtagagatggggtttctccatgttggtcaggctggtcttgaactcccgacctcaggtgatccgcctgcctcggcttcccaaagtgctgggattacaggcatgaaccaccgcacctggcctttttttttttttttttttttttaatatgagagggagtctccctctcttgcccaggctggtgtgcagtggcgcaatctcagctcacagcaacctctgcctcccgggttcaagcgattatctgcctcagcctcccgagaaactgggattacaggcatctgccacactcccggctaatttttgtatttttattagagacggagttttaccatgttagccaggctggtctagaactcctgacttcgtgattcacccgcctcggcctcccaaagtgctgggattacaggtgtaagccaccgagccaggcctgataatctactttttaaaaaatctaattcggccggacgcggtggctcatgtctgtgatcccagcactctgggaggcggaggagggcagatcacctgacgtcgggagttcgagaccagcctgaccaaaacggagaaacctcgtctctactaaaaacacaaaaattagccgggtgtggtggcggatgcctgtaatcccagctactcgggaggctgaggcaggagaatcgcttgaacctgggaggcggaagttgcgttgagccgagatcgcgccactgcactccagcctgggcaacaagaacaaaactccgtttcaaaaaaagaaagaaaaaaatattaataattcaagtgcttttttttttgtaaattactacattgggggaaacaaaattcaggcttaaccaactataaactacaattaacctctgattatataaacgggaaatttccatcttgattgtacaaattaagaatctacgtaactgtacataacccattactgaatttggttttcttcattatgcaccttataaaactctttccgtcaaatcccttccatagaccataaactacaaaccacagctgggtgctctgccatttttgaatcactctttgattaaatcctttattactttagtgatgactgccatcaatttttaataggagaaaagagggactggaaacctcactggaccaaagctcttcccattcatgaacccgcacccggagtcaggattctcccctgacgcccctcccgtggtccctgcacaatctgtgagagaggaggcgctgcgggtgaagagcggcccagagagggctccaggccagggcatagtcacagtgcaggaaggaggcaggtcgcccggggtcccgcagtcagcgcagccgccatcttatggctgaaggagactgaggccgagctgggcaagagctcggggcgcagactgtggagctcactgaggggaggcctgagtcccgccacagccactttccaccggttccagtcagccccttccccttctcaggatatcggacccggcactctcaccatttctaagcttccagggggtcctggcgtcctagctgtggatctccaaatacctacaggtcacagggccacagaggctaaggacacagagcagtaaaaacgagatccggagctccagctggaaccagaaacaacggccccgccacatcccacaagccgccctttccgctccagctgagtgcctgattggacggttcccagcccagagtccctgattggataatgtttaaatccccgcctcctcaggccctgagtgacagaagatgtgatctgatgctgagctgaatgaagagtgacgggccgggcgcggtggctcacgcgtgtaatcccagcactttgggtggccgaggcgggtgaatcaccagaggtcaggagttggagaccagcctggccaacatggcaaaacccggtctctactaaaaataaaaattaggctggtgtggtggcgggcgcctgtaatcccagctactccggaggctgaggcacgagaattgcttaaactcaggaggcggaggttgcagtgagccgagatcgcgccagtgcactccagcctggatgacagagcgagattctgtcacgaaaaaaagaaaagaaaagaaaaagaaaggaaaggatgacagtctaggctgcagccttttcaggcagggcttccttcctgaactgagccaggccaaccccagagggtatttgcatttaaccttttgtataaggtcacattcttttataaataatatattatatggttattcacaaatgaaaagaatataacaattatctaaaattttcagagtttatgaccttcctggcttctggttttttcatcagattgcctgaggttttaaaaagaaggcaatcctctgaaataaaattgtattttaaattttctagtagccaaactttaaaaattaaaaaaaaaaaaaacaggtggaatttattgtagcaatttaattaacccaatatatccaaaatatcatcttaatacgtaagcaaaatgtaaattataaatgaagtgtagatattttttggaacttcatctttgaaactaactctgtattttacctttccagcacatcacagttcagaccagccacattccaggcactcagtcgccacacatggccagtagctgccacattgaagtgcagctctgaccttaggagagggaagggcctgaacaaaccttttctgccaaagatggaaaaagagcctttccctaccaacatctctcttcagctctgagggaggaacagatagtagccataaataaagcacaggacagcaggaaaaaacaaccacaggtagaccactgctggccacctgttgcctacctttattccagagatcagaaggtgaactaaggatggtaaggccacaggagaagaaatctctgtgtcttcaaatctgtgcacagtcttgacctccaatgtttagatatgaagaaaatagattaaaggaaaacttacttttctatttgtccttggccctaatggtcaggctgtggttatctgttttctcctgtggtatgggggactgtgtgagtataggcaccaattacatgcatacatgtccacatatatttctgcattactcagcattctcttacgaggcctccaactttatatcaggggaaaaatcagtacctatagggtacccactgttagaagagaactagtaatcaacttgtcaatgaatcctggcatcctatctgcactgggtgcatgtattaattagctattgcagcacaacaaatcattcaaaacttatttgctcataattgagatggtcagctatttagggtgggctcagtgaggctgttctttttgtctcagctgagctcctccagacatgtatcttcagctgtttgttgaataggcagctgtgcttctggggatgagcttctgcttctggggctgtcaacaggggcaacttgcttctcctccccatggtatcttatcctccagctggctaacatgggctttattcatggagatggcagcattctgaaagaaaaacagaagcattcaagaccttttgagcctacgccccaaactagtacattgtcatgttcacaggtttctactgccctgagtgaataaggccagcaaaatctagggtttgaaaagcattctggatcttgatgggaacagctttaaaagcacctacaatgggcatggatacaggaaaaactagaaattgctaccatttttgaaatcagtatcattctgcctttgtttatttgtttgtttgttttgcatatgtggtttatagaactctttcacatcaagaatcttgtccaaagacacacagctactaagtggctgggctgagactcaggatcaactctgtctgactccaaagcccacacacctccatagatgacactactaaagtagctgccctagacccttgaagtgtcctggagggtgacacttccacagtagaagccagattccttttattttttttttattaatctatttcacttcttttgagacagggtctcgctctgtcacccaggctggaatgcagtagtgcaatctcggctcactgtaacatcctcctcccaagttcaagtaattctcctgtcacagcctttcaagtagctgggatttcaggtgcttgccaccacacctgactaatttttgtatttgtagtagagacggggtttcagcatgttggccaggctggtttcaagctcctgaccttaagtaatctgcctgccttggtctcccaaggttctgagattactaacatgagccactgtgcccagcctacattccttttacatttgtgccaatatagtactgtttatcattgggaataatcctctcaagaatttgcagaagtgcacagtggctcacacctgtaaacctagcattttgggaggctaatgtggaagaattacatgagctcaggagttcaagtgcaggctgggtaacatagtaagaacctgtcttcacaaaaaaaaatttaaaaattagccggacatggtggtacatgcctgtagccccagctactcaggtggcagaggcagaaggatcgcttcagcctggagggtcaagctgcagtgagccatgtttggatacaccactgcactccagcctgggtgatagagtaagatgttgtctcaaaaaaaaaaaaaaaaaaaaaagaatttgccaaagcattttaaaaagacatagaatactggccgggcatggtggctcaagcctgtaatccctgcactttgggaggccgaggtgggtggatcacctgaggtcaggaattcaagaccaacctggccaacatgatgaaaccctgtctctactaaaaacaaaaaaattagccaggcgtggtggcgggtgcctgtaatccagctcctcaggaggctgaggcagaagaatcacttgaacccaggaggcagaggttgcagtgagccgagattgcgccattgcactccagcctgggcaacaagagcgaaactgcatctcaaaaaataaaaaaaaaagacatagaatactttgtgtttgtagctgatggataagtttagaaaatcgaaacccaacaacagattatttttcatcacagaaaaaatttgaaaacttttaaaagaaaaatactttagagaaattaaatttaaaagagtttaaatgggcaaagaatgatttgcaaattgggcagcctgtggagccagagtaggctcagagagactgcagcatagccacatggtggaaaaagatttatggacagaaaaagcaaagtgacatacagaaaatgggggtgagatacagaaacagccagattgattacagcttgagatttgccttactcaaacatggtttaaacagctgatgttgttttattgccaaaaacacagtagttggtagaagagtgggttacagtctattcacatatccagttaggtttcagtttactatgtacagaaaacctattgacaaaaattaaacagaaaagacggcagctttaggctataactgatttaacaatttctcccttttggtcatcttctcaattttgagagataaaccaaaactttagacattgatagcactctgtcaccatcaaaagtgtacttatttagtctcaaatcccactgtgaaatagcagaactgtgggttttgtaaagcgaaaacaaggacttcaggttattattattactattattattgttgttattttttttgagacagagttttgctcttgttgctcaggctagagtgcaatggcatgatcttggctcaccgcaacctctgcctcccaggttcaagcgattctcctgcctcagcctcctgagtagctgagattacaggcatgcaccaccacggccggctaattttgtattttcagtagagaccaggtttctctatgatggtcaggctagtcttgaactcccaacctcaggtgatccgcccgccttggcctcccaaagtgctaggattataggtgtgagccaccgtgcttggccctattttttttaaaaaaggaattacagtagagggaaactccttgtgttaaaatctgctgtttacagaagaaagcaaagcctggactgctttaggatctacttatttccttacatttttagtgtgattatgtcatatttagcatgagtgactccatacaataatggattttttaaaaattctcagataatttcctcatgcttttttccagataattttattcttcatcacaggccattttttggttgtttttctttttctttttttaattttttaaattttttttttaaccattggttcattttgcctgacatcatacaatacgtattattttatttcaagcttgtcttatctggcagatttatgagatacatccagagtgtgtgatttagtagttcatttttttctatggctggatggtattctcttgtatgaatgagatacaatttgttcatctatttttatagagatggatatttagtttgttccttgctgtaagctatatgaccaaaaacgcctataaacattcttgtacaaatactttttggtatataactaaattcctttattagcatttaagtgacacctctttacatttcttagtggtttctccagggatcactatatgcatctgtaacatatcacgatctacctagagtttatactgtactattttaataaatgtaaaatatgaaaaccttgctgttgaagagtttcaattacctctttttattcatatattttacatctacacatcattatatctcacaataccgtgttataacttttccttaaatagtcataagtcttatagagaaattgacagtaaatagtgtttataaatatttggaggcaggtactttggggctatgtaaatacactatttatcctttaaatcttacccacaatttttgcattttaaagtacaccttgtctacagtaattattactgtggtgtcttagtggtgattttctattttgcattatgtgtctacattgattagtacttggaattttgtaaaaaacattttttctctttctttttttatttatttatttttctatctgtagggattcatgaattttttttattctctaggttttaatccaatgctattaatgtatattgtgtttttcacattttttcaccttggactcctgagaagtctttcaggttgattttctctgacatggctgcttctgttgttttttttttttttttttttttgagatggagtctcgctctgtcgcccaggctggagtgcagtggaatgatctcggctcactgcaagctccgccttccgggttcacgccattctcctgcctcagcctcccgagtagctgggactacaggcgcccgccactgcgcccagctaattttttgtatttttagtagagacggggtttcaccgtggtctcgatctcctgacctcgtgatccgcccgcctctgcctcccaaagtgctgggattacaggcgtgagccaccgcacccggcctgcttctgttgtttataaaccacttttaaactttctgacttcacaatactctaccttaatttggattttccactccagtgctagaattgtctattattacaagtagtcttgctttttttttaattgaagaatagtacttagaaaccgtgatatagagctaggtgtgcccattaatactggggtgtcactgcttctgcaacctctcagcaaacagagtttggaaaggtacatattaatattgactcctgtatgaacacatctctctctttctctctctctcaatggatatgttatgacacatgcatttatccaaatattctcaactcgtctagaattatctttttttttcaacttcagttagaagcaggcactaattatgttacatatatatactaacatatagagtgcttttaaagattgctaatctaggccaggtgcagtggctcacgcctgtaatcccagcactttgggaggctgaggcaggaggatctcgaggtcaggagatcgagaccatcctggccaacatggtgaaaccctgtctctactaaaagtgcaaaaattagcttggcgtggtggcatgtgtctgtaatcccagctacttgggggctgaggcaggagaatcgcttgaaccagggagtcagaggttgcagtgagctgagatagcaccactgcactccagcctggtaacagagtgacactccatctaaaaaataaataaataaataaataaataaataaatgctaatctatacgcttatagacaagcaatacctaccagaacacaatgtttgtgttcagttcttgagtcttgcagtatttaatcaaaatactgttattcaaagtgatttacaccaagtccttttattccaacgtttttcaatagggttaggtgatacatttctagtaaggttaagctcttctttttactacctgcattttacctgaattttccccaaatccttgttttttataatttgcagagaggaaaaatttattctttgtgatgtacagttccataagttttgaaaactgtctagagtcacatagccatcttcacagtaccacacagaactgcttcattgcccccaaaattatctgatgcttcctatttatagttaactctaccctcatctattctttggcaatcagtgattattttctttttatttttcttttgtagggaggtctttctatgttgcccaggctggtctcaaaatcctgggctcaaacaatcctctcagctcagcctcccaaagtgctgagattatatgcttgagccatcaagcgtggcctgattattatcaatccctacaactttatttttctacaatgccatataattggattatataatttgtaccctatcggatcttactttcttcacttaaagaaatgcatttgtgactcatctatactgtgatgtcgatcaatggtttttgtttgtttgtttgtttattgacaactaggattctattgtatggatgccccagtttgtttattcattcacctgttgagaagcatctggtttacatctagctttttgcaattacaaataaagtgagcaatagacatctacaaaaaggtttcatttctacattagttttcagtttgctttagtaataacctagcagtgggatgtcgtggtaacataataagtgtatgttcaactttgtaataagccactaaagtgttttccaaagttatatcatttcatatttctagttctagttaacccaaattttcatccacactctttgaaatttttctttttacgattgccattatcatatttgtgtgtgatctcattgttattcatgcttcatttttttccatttctgttgggaaacccgaattatataatcagtgcagaaagaaatgtataaaatgcttaggcattagccttggattctggaaactgacttccagaaatctgctatgcaattagagctttacaaacattaaaaaaaatagtttattatctgtggttttctttttcttttcttttcttttcttttcttctctttctttttctgagacaaagtcttgctctgctgcccaggctggagtgcagtggtgcagtctcagctcactgcaacatccccctttacagttcaagcgattctcatgcctcagcctaccgagaacctgagattacaggcaaatgccaccatgcccagctaatttttgtatttttagcagaaacagggtttttcgtgttggcaagccttgtctcaaactcctaacctcaagtgatctgcctgacttgaatttcattctctttctttcttttgagacagattctgtctcacccaggcaggcatgcagtggcatgactgcagctgactgcagcctcaaccatctgggcccaagcagtttttctcacctcagccttctgagtagctgggaccacactcatgtgccaccatgctcagctaatttattattattatttttagaggtgaggtcacactatataacccaggctggtctcaaactcctgagctaaaagaatcctcccacctcagcctcccaaagtgctggaattacaggcaggagtcaacatatccacattgaggttttattttttatatcaaaatatgaaaaatagcattgatgtccattaatagaattcaagaaaatgttatgcatattaaaaaagtaatttcgccgggcgcagtggctcacgcctgtaatcccaacactttgggaggctgaggtgggcacatcacgaggtcaagagatcaagaccttcctggccaacatggcaaaaccctgtctctactgaaaatgcaaaaagtagctgggcgtggtggcttgcgcctgtagtcccatctactcgggaggctgaggcaggagaatcacttgaacccgggaggcagaggttgcagtgagccgagatcccaccactgcactctaacctgaagacagaacaagactgtctcaaaagaaaaaaataataataatttcaaaagcaaatactaaaattcaaaacaaattgaaataaaaataactaaatattatatagatatatgaccagaaagagagacgtttagttttcttgactttatttatttaatttcttttatttatttatttatttatttatttatttatttatttttgagatggagtttcactcttgttgcccaggctggagtgcaatggcgcgatcttggctcactgcaacctccacctcctgggttcaagtgatactcctgcctcagcctccccagtagctgggataacaggcatgtgccaccatgcccagctaattttgtatttttagtagaggcggggtttttccatgttggtcaggctggtctcgaactcccgacctcagatgatctgcccacctcggcctcccaaagtgctgggattacaggtgtgagccaccacgcccagcctgactttatttatttatttacattttattttgctttaagttccgagatacatgtgcagaacctgcagtttgttacataggtaaatatgtaccatggtggtttgctgcacctatttaccaatcacctcagtattaagccccacattaattagctatttgtcctgatgctgtccctccccttgcccctctgacaggcccgggtgagcgttgctcctctttctgtgtccatgtgttctcattgttcagctctcacatctgagtcagtaatgcaatgtttggttttcttttcctgtgttagtttgctgaggatgatggcttccagcttcatccatcttcctgcaaaggacatgatctcattcttttcttatggctgcatagtactccatggtgtacatgtactaaattttctttatccagcctatcattgatgggcatttgggttggttccatgtctttgctattgtgaatagtgctgtaataaacataagtgtgcatgtatctttgtaacagaatgatttacattcctttgagtatatacccagtaataggatttctgggtcaaatgacatttctggttctagatccttgaggaattgccacactgtcttccacaatggtttaactaatttacactcccaccaacagtgtaaaagcattcctacttctccacagcctcaccagcatctgttgtttcttcactttttaataatcaccattctgactgacatgagatggtatctcactgtagttttgattcgcatttctcttatgatcgtaatgttgagctttttttcatatgtttgttggctgaatgaatgtcttctttagagaagtgtctattcatgtcttttgcccactttttgacagggttgtttttttcttgtaaatttgtttaagtttcctgtaaattctggatattagaccgttgtcaaatgggtagattgcaaaaattttctcccattctgtagattgcctgttcgctctgatgatagtttctttttctgtgcagaagcttttttgtttaactagatctctttgtaaatttttgcttttgttgcaatcgctttcagccatttcattataaaatcttcacccatgtttatctcttcaatggtattgcctagattttcttctagagtttttatggtttggggttttacatttaagcctttaattcatcttgagttaatttttgtataaggtataggagaggggtccagtttcagtttgctgcacatggctagccagtttttccagcatcatttattaagtagggaatattttccccattgcttgtttctgtcaggtttctcaaatatcagatggttgtagatgtgtgttcttatttctgaggtctctattctgtttcattggtcaatgtgtcagtaccatgctgttttggttactgtagccttgtatagtttgaggtcaagtagcatgatgccttcagctttgttattttcacttagaattttcttggctacgcaggctcttttttggttccatatgaattttaaagtagctttttctagttctgtgaagaatctcaaaggtagtttgatgggaataccattgaatgtataaattactttgggcagtatggccattttcatgatattgattcttcctatccatgaggatgaaatgtttttccatttgtttgtatcctctcttatttctttgagcagtggtgtgtagttcttttttttttcttcttcttgagatggagtttcgctcttgttgcccaggctagagagcagtggcgagatctcagctcaccacaacctccgcctcccgggttcaagcgattttcctgcctcagtctctcgagtagctgggattacaggcctgcaccaccacgcccggctagttttgtatttttagtagagacggggtttctccatgttggtcaggctggtcttgaactcctgacctcaggtgatctgcccacctgggcttcccaaagtgctgggattacaggcatgagccaccgtgaccagcctggtgtgtagttctttttgaggaggtccttcacatcccttgttagctgtattcctaggtattttattctcttgtagcaattgtgaatgaaaattcatgcatgatttcaaaatctgcttgtttattgttggtgtataaaaatacttgtaatttttgcacattgattttgtatccagagactttgctgaagttgcttatcagcttaaggagtttttgggctaagacaatgggattttctagatacagcatcatatcatctacagagactatttgacttcctctcttcctatttcaacaccctttatttctttctcttgcctgattttcctggccagaacttcaaatactatgttgaataggagtggtgagagagggcattttgtcttgtgctgattttccagaatgcttccaggttttgcctattcaatatgatattggctgtggatttttcataaatacatcttattattttgaggtatggtttttcaatacctagtttattgagagttattaacatgaaggggtattgaattttgttttttatttgtttgtttttttgagacagagtctcactctgttgcccaggctggagtgtagtggcacagtcttggctcactgcaacttctgcttttcgggttcaagggattctcctgcctcagcctccccagtagctgggattacaggcacccgccaccacgcctggctaatatttgtatttttagtagagatggggtttcaccatgttgatcacactggtctcaaactcctgacctcgttatccacctgcctcagcctcccaaagtgctgggattacaggcgtgagccaccatgcctggccaaggaatgttgaattctattgaagactttattattattattattattattattattattattattattatttgagagagagtctcgctctgtcacccaggctggagtgcagtggcataatctcggctcaccacaacctccacttcccgggttcaagcaattctcctgcctcagcctcctgagtagctgggattacaggcgtgcaccaccatgcccgggtaatttttgtgtttttagtaaagacgaggcttcaccatattggtcaggctggtctcaaactcctgacctcctgacctcctgattcgcccacctcagcctcccaaagtggtgggattacaggcgtgagtcaccagccggccgttattgaagaattttactgcacctattgagataatcatgtggtttttgtcattgtttctgtttatgtgatagattacatttattgatttgcatatgttaagtgagctttgcatcccagtgatgaaggtgacttgtttgtggtggataacttcttgatgtgctgctggattcggtttgccagtattttattgaggatattcacattaatgttcttcagagatattagcctgaagttttctttttttgttgtgtctctgccaggtttcggtgtcaggatgatgctggtctcataaaatgagtagggaggagtctcttcttttcaattatttggaatagtttcagaagaaatggtaccagtagtataggaattattaagaaattattttaggcagttagcaagggtaaaaaagttctcagtgaattttttctttaatagaaagcagcgaaaaaccatttcttttctaacataaagcagcctgaaaagtcaagctgcaagcataaataagcaagctggaagtttgcatagatgaatgtgggcagctgtactaaaagccaggaccacccagtatggcaattcccccttccttttctttgtccccatgtatgcagttgtcgtggagccggccaggtagaggccacatttgcataataaaagattgggatgggagggccagtttttttgcaggctgtgtaaatagtacacttgggcaaaccaatccttcgagccctatgtaagtcaatcaccccctcctcaagcctttctaaaaaatcaattgcatcctgttccaaacctggaaaaacttcttgggcgcccgctttctctgcataaggaagctgtctttctcctgctcttctttctttcatctgttaaacttcctgctcttaaaaccccctccaaggttgtgtgtccgtgtcattaatcttctcagcatgagataatcaaccccgggtatttaccctggacaacgatgctgcttcaccagctcctctttttacctctggtagaattcggctgttagtccatctggtcctgggctttttttgttgttgttttggttggtaggctatttactactaaattttggaacttgattggtctgttcaaggattcgacttcttcctggtttaggcttgggagggtgtatgtgtccagaaattgatccatttcttctagattttttagtgtatttgcgtagaggtgtttataatattctctgttagtttgtacttttgtggggtcaccggtgatatcccatttatcattttttattgtgtctatttgattcttctctcttttcttttttattactctagctagtgatgttgtagcaggacaagcggcagacaaaagccctcagacaccaagttaaagaaggaagggctttattcagctgggagtttcagcaagactcacgtctccaacaactgagctccccaggtgagcaattcctgttccttttgagggcttacagctctaagggagtctgcctgagagggtcatgatcagttgagcaagcagggggtacatgactgggggctacatgcacaggtagtcagaacagaacagaacaggacagggattttcacaatgcttttccatacaatgtctggaaactatggctaacataactggttaggtcaggggtcgatctttaaccaggcccagggcacggcgctgggctgtctgcctgtggatttcatttctgccttttagtttttacttcttctttctttggaggcagaaattgggcataagacaatatgaggggtggtcacctcctttagtgtatgtattttattaatttcttaaaaaaaaaaaaaacagattctgggccaggcacggtggctcatgcctgtgatcccagcacttttggaggccaaggtgggtggatcacgaggtcaggagtttgagaccagcctgaccaacatggtgataccccatctctactaaaaatataaaaattagggctgggcgcagtggctcacgcctgtaatcccagcactttgggaagctgaggcatgcagatcacctaaggtcaggagttcgagaccagcctgaccaacatggagaaacctcatctctactaaaaactcaaaataagccaggagtggtggcacatgcctgtaatcccagctactcgggaggctgaatgaggagaatcgcttgaacctgggaagtggaggttgcagtgagccaagatcacaccactgcactccagcctgggcaacaagaacaaaatccatctcagaaaaaaaaaaaaaggccaagcatggtggcgcactcctgtaattccagctactcaggaggctgaggcaggagaattgattaaacctgggaggcagaggttgcagtgagccgagatcttgccattgcactccagcctgggcaacaagagtgagactccatcccaaaacaaaaacaaaaacaaaacaaacaaacaaaaaaaccagctcctgaatttattgattttttgaagaatttttcgtgtctctatctccttcagttttgctctgatcttaattatttcttgtcttctgtcagcttttaaatttgtttgctcttgcatctctagctcttttagttgtaatgttagggtgttgatttgagatctttctagcttttcaatgtaagcatttagtgctatatatttaccccttaacactgctgtagctgcatcccagagattctagtacattgtctttttgttctcattgacttcaaagaacttcttgatttctgccttaatttcatcatttacccagaagtcattcagaagcaggttgtccaatttccatgtagttgtgtggttttgagtgagtttcttaatcttgagttttaatttgattgtactgtggtctgagagacagtatgatataattgtagttctttcgcatttgctgaagagtgttttacttccaattatatgatcaattttagagtaagttccatgtggcactgagaagaatgtatattctgttgttttggggtggagagttctgtaaatatctatcagtttcacttggtccggagctgagttcccgtactgaatatattttttgttgttgtttttttttgttttgagatggagccttgctctgtcacccaggctggagtgcagtggtgcaatcttggctcactgcaacctccacttccaggattcaagcaattctcctgcctgagccttctgagtagctgggattacaggtgcacgccactatgcctggctaatttttgtatttttagtagagacggggtttcaccatgttggtcaggctggtcttgaactcctgacctcgtgatccacctgccttggcctctcaaagtgctgggattacaggtgtgagccaccacgcccgtcccctgaatatctttattaattttctttctcattgatcggtctaatattgatagtggtgtggtaatgtctcccagtattattgtgtggaagtctaagtttttttgtaggtctccaagaaattgttttatgaatctgggtactccagtattgagtgcatatatatttaggatagttaggacttcttgttgaattgattcctttaccattatgtaatgcccttctttgctttttttgatctttgttggtttaaagcctgttttgtaggaaactaggattgcaatcactgctttttttctgctttccatttgcttggtaaatttttcttcatcttttttattttgagcataagtgtgtctttgcatgtgaaacgagtctaggccttgtggtgatgaattctctcagcatttgcttgtctgaaaaggatttcattactcctttgcgtatgaggcttagtttggctggataaaaattctgggttgaaaattattttattccagaatgttgaatattggcccccactttcttctgcttgtagcgtttctgctgagagatctgcttttagtctgatgggcttccctttgtaaatgacctgacctttctctctggctgcccttaacatttctttcttcatttcaaccttggagaatctgacgattatgtgtcttggggttgatcttctcataaagtatcttactgaggttctctgtattttctgaatttgaatgttggcctgtcttgctaggttggggaatttctcctggatgacctcctgaagtgtgttttccaacttggtttcattctccctgtctctttcaggaactccaatcagtcataggtttggtttttttttttcttttgtagatggagtttcactcttgttgcccaggctggagtgcaatagcgcaatctcagctcactgcagcctctgcctcccgggttcaagtgattctcctgcctcagcctcccaagtagctgggactacaggcgtgtatcaccatacccagctattttttttttttggatttttagtagagacagggtttcaccatgttggtcaggctggtctcgaactcccaaccttaggtgatctacccgcctcggcctcccaaagtgctggtattacaggcatgagccactgcgcccagccggtttggtctttttacatagtcccacagttctcaaaggttttgttcattactttttattcttttttctctaatcttgtctgcctgccttatttcagcaagatagtctttaagctctgatattctttcttctgcttgattgctttggctactgatacctgtgtatgcttcacaaatttctcatgctgtgttttcagctccattaggttatttatgtttctctctaaactggttattgtagttagcaactcctgtaatcttttaccatggttcttagcttctttgcattgggttagaacatgcttctttacctccttgaagtttgttattacccaccttctgaagcctacttctgtcaattcatcaatctttttctctattcagatttgtgccctttctggagaggtgttgtgatcatttggagaagaggcactttggccttttgtgtgttcagcattttttggttgattctttctcatcttcatgagtttgtctggttttgatctttgaggctgctgacccttggatgaagtttttgtcaggactttttttgttgatgttgttgctgttaccttctgtttgtttttctttcaatagtcaggttcctcttctgtaaggctgctgtggcttgttgggggttcacttcaggcctatttatccaggtcactcctgcatctggagatgcccacagaggaggctggagaacagcaaagataggtgcctcctccttcctttgggatttctgatctcgagggacagtgacctaatgtctgtaggaacactcctgtataaagtatctggagattcctattgggggtctcacacagttgagagcatgggaaccaggaaccatttaaggaagaattttggctgtcccttggtggagggggtgtgccgtgctggagggaaacccatttgtctgggctgcctggattctgcagagctagcaagaggaaagactaagtttgctggtcattggaggctatggcaacttttccccctagggggtcagaaccaggaagatcagggttctgttcctgagctcctagctggatttgttggagcttctgcagggaggccccactcagtgagaagggatggatcagggtctggcctaaagaggcagtctggccattgtctgcaaattgggaccaagttgtctagcctccctgactccaacagggaagtagcatggcctggagctatagtgatggctgccaccctcccctacaccccaggggcttagtgcctttggtagttagcagctgcagggatagctgctgcccctccaccagggagttcagatggcttagactgcaggcagccacagtatgtagcccagtctggtctcaaactcctgggcttatataatcctcccaccttagcctcccaaaatgctggaattacaggcatgagccatcacatccacagtgaggttttattttttatatcaaaatataaaaaagagcattgacattcattaatagaatccaagagaatattatgcaaatttaaaaagtaatttcaaaagcaaatactaaaatcgaaagcaaattaaaataaataaaaaataactaaatattgtatagataatatgaccagaaagagaaacatttaattttcacgactttgaagtgaagtttaccaatgggatatttttagtggagaagattctatttccataagaaattcaaaatgagataatttccaggttttaaaaactgatgcaaaacatataaatatagaaagcctctaaggtatgtagtactacttgacatgaaaactgggcaaactcagcaaaaggaaatttttttttttgagatggagttttgctctcgtctcccaggctggagtgcagtggagtgatcttggctcactgcaacttccgcctcccgggttcaagcaattctcctgcctcagcctcccaagtagctaggattacaggtgcccgccaccacgcccagctaattttttgtatttttagtagagatgggatttcaccgtgttagccaggatggtctcaaactcctgacctcaggttatccgcctgcctcagcctcccaaagtgctgggattacaggcatgagtcaccacgcccggcagcaaaaagaaatttaaaattaatctcaagtgtcagaatagatacagaagttctaataatataatattaaatggaatccagagttttattaaaaaataatatgttgtatatttatgtattgtgttattaaactgtaaatgttattaaaaatagaaaatctttttttatttaattatgtaaaaggttaaaaagtgagcagggcatggtggctcacacctgtaatcccagcactttgggaggctgaggcaggcggatcacctgaggtcaagagttcaagatcagcttggccaacattgtgaaacccagtctctactaaaaatacaaaattagctgggcatggtggtgcatgcctgtaatcacagctcctcgggaggctgaggcaggagaatcacttgaacccgggaggcagaggttgcagtgagccgagatcatgccattgcactccagcgtgggtgacaagagcaagactgtctccaaaaaaaaaaaaaaaaaagtggctgggcaaggtggctcacgcctgtaatcccagcactttgggaggccaaagcgggcggatcttgaggtcaggagatcgagaccatcctggctaacacggcgaaacccagtctctactaaaaatacaaaaaattagcctggcatggcggcgtgtgcctgtagtcccagctgctggggaggctgaggcaggagaatggcgtgaacctgggaggcggagcttgcagtgagccgagattgcggcactgcactccagcctgggttgtggcactgcactccagcctgggtgacagagcgagactccatctcaaaaaaaaaaaaaaaaaaaaaagtggccattctcagtaattttgaaagcagcattgtctaaacagatgtgaatttgcatctacatttatctacacatagatttacatagtatctgtctatgtgttcttcatccatccatttatagaatgtataaaaaggatggatttaaaatagagtgatttaaaaaagcatttgaaatgtattatcacagttaattacattgtctagatatttatatgttcactcacaaaatataaaatgagattattttatcaacccttccagataatttttttcatttattttatttattatttttttttgagatggagtctcgctctgtcgcccaggctggagtgcagtggtgggatctcggctcactgcaagctccgcctcccaggttcatgccattctcgggcctcagcctcccaagtagctgggactacaggcgcccaccaccacgcccggctaccagataatttaataaaatattttaaaactatgtgactaatattattagctgaaaataggaaagaatatatttatttgcacaaataataaaaatgctaaactaaatgtaaaatataaaaatatccctgaaaaaggcaaataatgtacactatttaaaaaataactgtgctacaagagttatgcagcatacaggaatcatacataaatatcaactatttatatctattttttgagacaggatctcaatgtatcacccaggctggaattctgtggttgatggtgccatgagtaaccacaccttacctaactatagacattttaaataatttcagtgtgaaatactaaacataattcaaaatatattttccttatatgtaatgaggcaaacagtttcaagatctaaatgatgagtgaaaaagaattccaacaacctgcggcatgataatgcaaatagctcacgtgtacagcgctctcactgtgccagcccatgtttagaagcatattagatatttttgcgcattaaattatcatcagaaataactctttcaggtaagtttaattattccccatgtcgcagacaaggtgactgaatggaaaaatattcagggacttatccaaggtcacccagatagggagtgggtgagctaaggtgtgctctgacctcctctctgcttccctggcacagacagtcccattgttcattgattaaacagctctcattgagcacctgccatgggccgagcactgtgcctggtactgggaacatagtggtgaactagacacaactcccaggagcaaacactaaagaagtaaacaacaaacagcaagattattgcagagaatgacaagttgctaagacatgctgctgctgtaaaagatggacgtgcatagggctattgggggtgggttctagttggagggaggagggtggagcaaacctccccaaggaagagctgagcccagcctggaggctcctgtcagtgtgaggatgtggttagagtctgtctcagtttctttccatgcagcccctaaaatctttggaatgtctgaaatgagaagtgtcttttccatgtaggcactgatcctcacatacattagagaacagaactcttgctgtgcccacggccagggaaaggggaacaatatctctctaccttgtggatcctagagcaccttgtcctgccaggacgctcaccctcacccccacaaggtacagatggcaaccagggtgccgcataccacccactggctcgcccaaaggatgctgagtcctgtagggaccgtgggcctgaataatgtttcctagtcatagagtctttctgattttctcactcactagccctgtgcctcagtttccctcactgtggcacaaaatcaacatcccattccgcaggctaggtgacccagagaggtcaccacagcccattaaatgactatagcatgtgaaagtgggaagtgagagtccctccctgctctgggtcttttgccccaggacagatgtttatcaggccagctgcctggggagggccacacctcctgacttgggaacattgtttccaaattgaggtcactacagttaaggactcccaatgcattggggtaggcacaggggtgggatggggtaaagcaacatcgcattacaagagccttggatcgaccctggagagcgagaatcaaatttagactcctgtctgaagctgaccaccctgaataattaggatttggggatacgacaaggctcttggttcaggaaacaagatcttctggttctggactctgtagctgtcctggggacttgtttccaactatgtgctttaattgaacctaaggggatggggcactcggaaggaactcttaagccaagggtgagaggcctgccttctgcctcccaaactccctccccagtggtggacattgggcggcaaaatttctttacaaagaaaaaaaaaatatccagagaccaggaaggctaataaatgcttaccaggattatccagcctaatcatcacaacagtcctgccatattcgtcctctgggacaggtgaggaaactgaggttggaggaggacaccgggagcctggtcgggccactggaagcctggagccccagagttcccggcattcaccgccctccaaccccctctctccctcccggccccgggaagcttcattcccagctcattcacttgtcaatcactcagactcgctgggcctccagccctccctgaagccctcgcactcatcaggtgacggcctccctctgtgtggctgccaggctggggatgggggtgtctgtgcttcccttgcccaagccgagagtggcctgttcccagggggcaggcttcctccttggttggcagccaggagtctggagcgcaggtgccgggcaggcagcactgggagcgctcggcgacttagctggaggcctaaggagccacccctcacggaccagagcgcctttgcaaggtgggctcgccgcacactctgctcctcttctgtggccccggggcccctcctagaacaccctcctcatctcgggggaccttgaccgccagcagccccacacctgctacctctgcctggcgttgggtgcgcacctctagggacagatggatcccttagcccagcgggcttgacagcagggtgggggcagtgggggctccagagagtgtcaccgccttatgctggccaccgccgggcaggggctgggctcagctgacaccctacatccgccctccagattccagtgtctgacttcggcgaatctggaccggacgcgtggtctggggcctggactgtggacgcccatgggccgggctccccgcggggacctcgcacttgggtggggaccctgcggctccaggcgccacacacatcagtgcgcccgctctggctgtgaatttcggggaggggcggcagcagagcacgtgggctggctgggtggggacgatcacccgccagcgccttttcccacccgggcgccctttccagtccccgcgtcgcctgcagggccgcccctcctccgcccgctggttcctccccactcgccgctctccagccccgcgcggctctgtggcccgggctccaaggcgggggccgcccacgacggccaccggcagggacagcgggggcaaatttcccagagcggtaagccggccccagccagccccacggcagggatggcttcgaatccgagcccccgacaccccggccccgtccgcccagcccgcaccctgcgtggctcgctgcccgcccgtcccgcacccgctcggtcactcgggctggggccccctgcagggtgggcgcgacccagcgccgccgcacggagcctgaacccaaaccccaaacccggaccgcaggatccccgccctctaggaaccaggacgggccctcctagcgggtatttggggacctgggtgtgtatctgtggaaacaattggtcaaaagtggctttttgttttcccaaaggtaaaggctcctttgtaattatgtattttcttcttatttacttaaaactgatagaatctcatcatttagatgaatccataattgtgtcagtgaatttgagtacactttttaaagtttttctcagtttaattagtccttttttttgtttctagtttaagaagaattttaaattctacctaaaattagtaaagtgaactccaaaatatctgagataggtctcaatttagaaaatttattttgccaagattaagggcacacctgtgacacagcctcaggaggtggtgacaatgcgtgcccaaggtgattggggcacagcttgattttatgcttttttttttttttgagacggagtttcgcccttgttgcccaggctggagcgcagtggtgcaatctctgctcaccgcaacatttgcctcccgggttcaagcaattctcctgcctcagcctcctgggtagctgggactacaggcgcccgccaccacgcccagctaattttttgtatttttagtagagacagggtttcaccgtgttagccaggagggtctcgatctcctgacctcgtgatccgcctgcctcggcctcccaaagtgctgggattacaggcgtgagccaccgtgcccagccctgattttatacattttaggagacaggaaacatcaatcaatatatggaagatgtacatcgtccaagaaggtgggagaactcgaagcagggcaggagcttccaggtcataggtagataaaggactaatggttggttgcaatttttctgagattctgattagccttttacaggggtatttccaggtctgtctctcctaagcttgcccaagagaaacttgacaccaaggttgtataattttaatctgtttttgccaaatttttgtctatttcataacttacaataacaggtaatttaaccaaaacccttatggttttctagcacaattatattataagctacatatgtattcttagcaaggtaaaagcaatagaaatgatgatgataaaataacaacttttctgtgcatgaatagcccttcagctggtgacatcacacagcccactgttgaggttccgagtcctacacccacatgcaatcaaaagatggaaaatcgacttgcacacatggatctggtttacaggctggttgttgactctcacaccgtgattcagcaaacctgtaaggctgtgactttactaagaagacaaagtttgcaggaggaatagaggctttgatgcagtccactgctgagattgtgacttatgtacttagactcaacattcaggaggtgttgactcttatacctagaactgggacatgtgtgaaattattattattttccttttttttttgagatggagtcttgctctgtcaaccaggctggagtacagtggcgtgatcttggctcacttcaatcttcacctcctgggttcaagtgattctcctttctcagcctccacagtaactgggattacaggcatgcatcacaacgtccagctaatttttgtatttttagtggagacaaggtttcatcatgttggccaggctggtcttgaactcttgacctcaggtgatctgcctgcctcagcctcccaaagtgctgggattacgggtgtgagccactgcgcttggccatgtgtggaattattagtctcacccctggatcttattgcagatgttattgtgacatatgcctctcccagcacctgagtgatttgactctcttgtgaggtcttagctgacagattggattgtggcatatcacctaggtgatatgacactattcgcctgccttggcactacctacttggggctttgtgacatatgtctgtgctcataactaagatgatgtgattctcttctcttacctggtctctgctcacatgggagataatgacatattgctgggaccaataccaaagtgacattactcttttaccttgaccttcttctcagaaaacattgggacatattgttgggcccaccaccaacatgatgtgagtcttctgtgtggtctctgaccacagagatcatcgtgacatatctctgaaagttcaaaactatttgaagcgattatcttgttatgcctgctctttgcccataggagagaatgtaacatttctgtgggcccagcacctagttgatataagtgtgcctggcccatgcctacaaaagaaagactgacttatccatgggtccagcacacaggtgattccattctactgccttgattattgcccacaagaatcactgttacatatttttgggctctcctcctaggtgatgtgagactcttttccttccctggtcccatccacaaaggagattgtgacatatcacttgacccagcacctacgtgatctgtctctcatctgatgccttggcccttcccactgggctgatcatgacatatagctgggcacagctactaggttatgtgactcttctcttcctgagtcctgcccacagggagcattgtgacctatctctaaacacttcacctagataatgggactctttcatctgggccctccccaaagaggctattgtgacatgtttggatcaagcacctaggaaatattactgttctctcctacctgttacctgttactggtagtgaatccgtatgggtacaggtctgcagcaacctcaattcttgcctcctcagaagaaaaaaactcaactgaggggcataaggcagaaggagagaccaaggcaagtaatagagcaggagtgaaagtttattagaacaggaacaaaaggaaaaaatgtacacttggaagaggaccaagtggatgacttaaaaggcaagtgcacagtttgacctttggagctggggttttgtatgttggcatacttctggagtcttgaattacttctccccattcacccaactcctgagatcttattgggaagctgctgatcaccagtttcagctgttttctatctattaagagactgcctttcactagtgccagctgtgctgtaaccaattattactttagagggacagctaacaactgcctcacctgaccatcacctgatcattgactgactctcctggtgtgtgtgtggggccctcacttgccctgttcatacctgactagctacctactgtaacgctgcatgcattgtgtattgtgacatataacagggcccaatatctaggtgaggtgactctactgcaagggccctgcccaacaggggtattatgatatatttttacattcacgatttaggcgatttgcctttctctttctgccagacccctgccaaaatatggatggtgacatatcactgggcctaatgcctaggtaatgtgacttctgtcttttgaatgggccccacatattctgagtaccatgacatatcactgggccaaacatctagaagatgggaggtgccgacctgtgtactgtaaacagaactttagccctaccactctcaagagcctcgtgacatatctctgcatttgtcacctaggagatgtgactctcccctgctgccttcaccctgctcacagggaaggttgtgatataacattgacccagcaacaggatgatgtgtttccttttcctaggccttgctcacagggaccattgtgacatatcactgggcccagcacccaggtgctgtgactctgctgcctgtgccctgcctgtgtcctgctttcagaataggattgtaacatagacctggctgagtacccaggtgatgtgactcttctctctggttcctgccgtcagagaagattgcgatatatccctggcctagcatcaaaatgatgtgactctcctgtcactctctatccacaggtaggattgtgaagtatatcttcgttcaactcatcagtgagatagtaactttcatacctcaaaccaaccaataggagagacactatcttttgaagctaggctttgggaaatagataagatcccatttctcctctctgtatgaagatcacagtggatgtctgctgtcttatatatcacatcagcccctcatgtgttacagagggtgtcatcacagggcccagcacacaggtgacatggcatttcttattttttgagacggagtccctctctgtcccccaggctggagtgcagtggcacaatattggtgctcactacaacctccgcctcccggattcaagcagttctcttgtctcagccttcccaatagctgagactacaggtgcccgccaccacgcttggctaattttttgtatttttagtagagacggagtttcaccgtgttagccagaatggtctcgatccctgacctcgtgatccacctgcctcagcctcctaaagtgctgggattacaggtgtgagccacctcacccggccaacatgacatttcttgtgtgcacaccctgtcatccatcaggattgtcaccctcacgcatgaacagagcctactggtaaggtcttgaatttcacacgtgaatgcagtctacagttgaaattgtgattgtcatatgtgaacatccagctgcaattggcatggtgattttcaacctagctcctaggcaggtgaggactcttttatctggaaccagcccattatagagatgttgactctcacaactgagcttagttccacaggtacaatcatgggtccataccatcatgaaggtcatagagcagtttgtaactctcactaatactgcagaaagctctcgggtggtactgggtcttaaagaacctagcgcacaggtgagattgtgacactcatatgcaaacccagtcaacagtaaaaattgtcctcttttgacatgaacacagcccactgttgaggtcccaagtctccctcatgaaaacagtttaaaggtacgaaattgactcttatatgtagattcagttcacaggtgggttggtgatgctcagaccaatattcagcacacctgtgagtctgtgactccagtaagcatccacagtctgtaggagaaactgaggccctcgtaaacgaatcaagtgcaccattgagactgtgactcttgtacttagactcaacatatagaaggtgttttttttgtttgtttgtttgtttttgttttgttttgtttttgtgacagagtctcactttgtcacccaggctggagtacggtgtcatgatcttggctgactgcaacctccacctcctgggttcaagcgattctcttgcctcagcctcccaagtagctgggattacaggcacccgccaccatgcctggctaatttttgtatttttagtagagacggagtttcaccatgttggccagactggtggaggtgttgactctcaaatttagaaatgggacatgtgtaagattgttaatctaatctccaaattgtcttgcaggtgttattgtgacatatgtctctgcttagtacttgagtgatttgactctcctgcctgggcccagtccatagatgcaagtgtgacatatggcagaacccagcacttaggagttgtgactccatactcctgcctttgtgctgcccctagggttggaggggggaggattgcaacttatcactgggccttgcatccaagtaatgtaagtctttcttttcttggcaatgcctacaggggacactgatatattcctgggtcccaaacccagtttatgttattctcctatttgttccctgctcacatggcccatttctactaaaaatacaaaaattagtcaggcattgtggcgggtgtctgtaatcacagctgcttgggaggctgaggcaggagaattgcttgaatccaggaggtgggtgttgcagtgagccaagattgagccactgcactcccgcctggatgacagagtgagactccgtctcaaaaacaaacaaacaaacaaaaaaactgactatcatatgtgagcatctggtcaaatttggggtagcaaaacttttttgtttttttttttgagatggagtgttgctctgttgctcatgctggagtgcagtggcttgatcttggctcaccacaacctccagctcccaggttcaagcgattctcctacctcagccacccgagtagctgggactacaggcgtgtgccaccaagcccggctaatttttgtatttttagtagagatggggtttcactatgttggccagtctggtcttgtgatcttatgatcttatgatccgcccacctcggcctcccaaagtgctgggattataggtgtaagccaccacgcccggccagcaaaacatttttaaatgaagctcataggaagatgaaggctcttgtatctggattcagaaaattgaaaagatgttgactcatatctgggcttaattaccttagatgcactcataggtttataccagcatgaaagtctcagactcgattgtaactctcattcaaactgtataaagccctaggatagtacaaagagtgacgtaatagggccaagcacacaggtgagattatcacactcatgtgcacaccctgccaacagtaaagactgtcattctcccatatgaacatggcccactgttgagactttgaacctcacacacaaagacagctgaaagttggaaaattgaattacatatgtggttctggtccacagatgttttgttgactctcaaagcaagattcaggacacctgtgagcctctgactccactaggggaacacaattcacaggagagattgaggctttcaaatacagatccagaccacctttgagatggtgactcatgtaattagacacaacatacagcaggtattgactctcatacctagaaccaggacatgtgtgggattcttaatctcatccctagaccttcttgcacatgtgattgtgacatatgcctcttcccagcacctgagtgatttaacctttctgcctgggccctacagatggaattgtggcatatcactgaactcatacctaggtgacgtgagcctatacttttgccttagcacttttcacagacagcatagtgacatatcactggccctagaacccaggtgaagtgactttcctctattgcttggtctctgcccaagaacagattgtgatatgtcactgggcctatcacctaggtgatatgatttttctctcctacctggacccaacactttcataatgcaaatctcctgcttgggctcgcctacagaggtattataatatatctgttcatttatcacctaggggatgtgactctccttttctgcctgaaccctgctgaaagggagaattctgacatatcactgggcccagaatctaggttatgctacttttctgtttttcctgggccccacatattttaggtattgttacatattgctaggtgtcattcctttgggctgggatgctctggcttgcccacaaggggccttgtaaaatatttctgtatctgacacctaagatatgtgagtttcctcttttgcctgcatcctgtccacagaaaatgttgtgatatatcactggacccaggcaccaggtgatgtgtctgtcctgccaaggctgtgcccagagggagcattgtgacatatcactgagttcagcacccaggtgatatggctttgctgcctgtgctctgctttcaggaggggattgtactatatctgtggctgagtacctaggtgatatgactcccgcgtggtttctgccctcagggaagattttgacatacccttgccaaaaacctacttgatgtgactttcctggttgctccctagccacaggtagaattgtgacatatattttggccagctaccaggtgcattggttacctcatacctcaaaccagctaatagaagagacactacctccgatagctagacttaggaaaatgagtaagatcatgggtctcctctttgtgtaaaggccataaaggattactgttcttttacatatcatataaagcccttgaggggtacagaaaatgtcatcacagggcacaataaaagtgagattgtgtttcttgtatgtgaatcccatcaactgttaagactgtcaccctgacacaaggacagagcccattggagaggtcctgaatttcacacgttgacacagcccacagttcagattgtgactgtcatatgtgaacacccagctacaattgggatggtgatgtatttctaattctggcaggttaaatctcttctatctggacatatccaactggagagatgttgactctcattactgggcttggggccacaggaaggatcatgggtctatatgagcacaaatgtctcagagcatattgtgactttaatgtatattgtagaaagccctttggtggtacagagggtgtcctaacagagcacagcacgcaggtgagattgtgacactcatatatacaccaagctgacagtaaatattgtcattcttctggataaacacaggccactgtttaggttctggatctcacacccaaagtaagttgaaattgaaaaattgatgcataaatggattcagttcacagatgggttggtgactctcagaccaagatccagcatatctatgaggcattgacttcactaaagggacactgtctgcaggagggattaaggcttttatgaacagattcagtaaactgttgagattgtgggttataaacttagacccaacatacaggaggtggcgcctcttatacctaaaaccaagaagtgcaggattgttaatctcttctctggaccttcctgcagctgtgattgtgacgtatacctcagcctagcacttgagcagatttactgtcctgcctgggctcagcccacagattggatagtgacatcttgctgcatccagcatttagtcaatgcgaatctacactcttgtcttggttctgaccatagagagaattttgacatatcactgctccttgcacataggctatgtgactgtcctgcctgtgttttgcccacatgggccattgtaacatattgctgagtccagcacccaggtgatatgatcctccagcctttcctctgcctacacaagatagtgtgacatatctttgggtccctcacatgggtgatgtgactctcctgcctcacccttgtttcaagggatattgtgacataactgctgtaaccagcacctaggtgatgcggctattttccactgcttgggctgtgcccaatgaggaattgtgaagtgtctctctgcccagtacctaggtaatttgactctcctctttttcctgggcactgcatacattgcgtatttgaaaatatggctgaatccaacagctaggtgatgcaactatcttacaaaggccctgcctagagatgtattacgatgcattttttatttattacttaggtgatgtgactatcttcttctgccttggccctgcctaatttgagaattgtgaaatatcactggacccggcacctaagttatgtaattctcttctattgcctgggccctacatattttgggtattgtgacatatcactgcaccaaacaccaaagagataagaagctcctgcctaggctatgcctacagcagcccttgtgacatatttctgaattcattatgtatgagatgtgactctcctcttccgcttgcactctttctatagaaagattatgacatatcactgggcccagcaattaggtgaggtgtctgtcctgcttggaccttgcccactgggagcactgtgacatattgctgggcccagcactgaggtgatgtgactcctttctggaccctgcctttaggaagaattgtgacatatcgctagcccaaaaccaaagtgatgaaactttcttgcttactctataaccacaggtaggattgtgacatgtatctttgcccagctcataggtatgattatgattgatacgttgaattagccaatagaagaaatgctatctctcacagaaaggcttaagggaaatgaataaatccttaggtctcttctttatacaaaggttgtaggtgagtaccactgtctcacatgtcatataacgcctttgggtggcatacagtgtcatcacagggcccagcacacaggtgagattgtgtttttcatgtgcacactgtgccaaccattaggattgatactctcatgaataaacagagcacacttctgaggttctgaatctcacactcagatgcagttcaaagttggaactgtgacggtcatatgtaaatatccagccacagttgagatggttattcatttctaaacctagctaataggcaggggagaactcttctatgtaaacccagttacttggagagatgatgactctcatacctgggcttaatttcacaggtacagtcattggtccatagcagcataaaggtctcagagtggaatgccactcttaggtatatcatataaattcatcaggtggtacacagattgctctaacaaggcccagcacgcaggtgaaattgtgacacacatattcacacacagatgacactaaaaattgtcatccttccacatgaatacagccctcagttgaggttctaaacctcacacccagaagaactcacaaattgaataattgactctcatacatggatccagtccacaggtgtgttgatgactaagaccaagatagacacaccttagaggctgcaacttcaccaaggggacacagtttgcaggagggattgagtctcccatgcaagggtccagtctacaattgagattgtgactcatgtacttttatctgacatacaggagatgttgattctcatatctaaatccaggacatttgggagactgttagtcatatctatggactttcttgcaggtgtaattgtggcatatgtttctgcccagtacctgagtgattttactttcctgtatgacccaagcccacagatgtgattgttacataccagtggacccagcacctaggtgatgcaattatatttttctcccttggtgctgtttgcagtggggctttgtgatgtatcactgaacccagcacccaggttatgagactcttctgcctgtgccctgcccagatatgccattgtgctatattgctgcatccaacactatggtcatgtaacccacttgcctgggctctgcctacagagggaattgtgacatatctctgcacctattactcaggtgatgtgactcttctcctgcatagtccctgctcatcagagggattttgactaattcttaggcccagcacctagctgatatgattcttctttctaggtcctgcctgtaggggagatagtgacatatcactaggctcaacagcaaggtgatgtttttcttctgctttggccctgccctcaaaagtcattgtgatgtattgctgagtccagcaccaaggtgatgcccagttcttgcctgaatcctgcccacaggaggcaatgtgacttatctctgtgtccatcaacaatttgatgtaactttactcttttgcctgggcttttagcataggagagattgtgatatatctccatgacctaggttacatgactgtcctcttctgcctgggccatgcccacaaaagggagagtgacttttcactgggcccagcacataggtgatgtaattcttcctcctggtcactgctcacagggtttattatgacatatctttaggcccatcacctaggtgatatgactatagttttcttcctaggaccttttgacaggactgtgatatgtcacttggcccagcacctatgtgatgtgactgctctcataactgacccctgccatctagggtgattttgacatacagctgatcccagtttttaaattatggcactcttttttactttgtgagtcctgaccacagaaagcattgcaacatatctcttggcctctgacgtacaatatgtaactatcctgcctaaaacctattttcagggggtgttgtaacatattgctgaacccaccatctaggtgatgtgactgtcccatactggatgggctctgagcaaaatgggactgtgatgtatcactagggtcagcacctaagtgaagtgattctcctctttttcccaggccctgcatacattgtgtattgtgacatatgtgtgggtcaaacacctaggtgatttgactcttctgcctggagctttcatacagcatactatgacatgtcttttcatttattacctgtgttatgtgactctccttttctgcctgggccatgccaaaaggggggattgtaacatatcactggaccaagcacccaggtgatgtgactctcctattttatccagcccccacatatttttagtattctgatacatggctgggcccaacacctaggggttggaaatctcctttctctgccatgctcacagtggacctcatgacatatctctgcacgtgtcacttaaaagatgtgacccttttctgcctgcacgctgcccataggaaaaattgtgaaatactcatgggcccccaaaccaggtggtgtgtctctcctgcctaggccttgttcacagggagaattgtgacatatcactggactcagcacccaagtgatttgactctgctgcctgtgccctgctttcattagaggatattcacatatccctggcagaaaaccagatgatgtgactcttcttccgggtcccttctctcagagaatattataatatattcctgactcaagacccaggtaatgtgactctcctgcttccttcctatccacaggtgggattgtgacatatgtctttgttcagatcatagatgcaataatgactctaatacctcaaaccatccaataagagatatactgtctcttctagctaggtttagagaaacaggtaagatcctgggtctcctgtttgcataaaaataatatcaaattaccactctcttgcttatggtataaagcagtttgatgggacagaaagtgtcatcatatggtccagcacggcacacacgtgatacggtgtttctcatatgcacaccctgtgaaccattagaactgtcacccttacatatgaacagagcccacttttgagaacacaggtaaaactgtgactctcctatgcacactcagccaacagtaaacattgtcaccctcctaaatggaaaccatccactgttgaggctgtgaatctcccacgtggaggtagtcaaaagttggaattgtgactctcatacatggatcttgtccataggtagaatggtaactcaatgaacaggattcagcacagctgtgaggctgtgattcagatattgagactcagtttgcatttgaaattgtgtcttcacgcaggaatacagtccaccattaagacggtgactcatgtacttggaccaaacataaagaaggtcttgactttcatacctggagccagaaaatgtatggaattttgaatctcatttctggacctgcttgcaggcgtgattgtgacatataccttggtccagcacctgagtgatttgactatcctgcctgggtaaagcctcaaaatggaattgtgacacatgcctggtgcaagcatctaaggtattttactctcctgcgtagaccctgtcctcagggagaattgtgacatcctgctggacccatcgcctaggttatatattctctcctgcctgggccctttacacagggtggattgtgacatattgctgtgtcctgcatgcagataatgtgactttcctgcctgaaccctgcccacagaaggcactgtgaaatactcctgggcccagtacccaggttatgtgactttactgccacagccctgcccacagagtggacattgacgtatttttggtccagcattcaggtgatctgaatctcttgcctgctccattcacacagcttaaatttagacatatgtattttcaagctcttagacattatagtcaagcttatatgggaacccagccaataagagtaattttgactctcttagctagattttggacagtgggtagagtcctggatcacctacgtttagaaaggtcacagaggtttataaaatttatgcataattggccaggtgcagtggctcatgcctgtaatcccagtcctctggggggccaaggcgggtggatcacctgaggtcaggagttcaagaccagcctgcccaatatggtgaaaccccatctctactaaaaatacaaaaaattagccagttgtggtggtgtgcgtctgtaatcccagctactcaggaggctgaggcaggagaatcacttgaacccgggtggcagaggttgcagtgagctgatatcatgccatcgtactccagtctgggtgacaagagcgagactccatctcaaaaaaaattatgcatactttagaaatactttgtgtgctacagagaatgtaataatagggtctaccacacaggtaagattgtgacttctcacaggcataccaagccaacaattaggattgtcacttccaaacatgaaagaagcacactggtgatgtcctgaacctcacatgcagatgcagttcacagttaaaattctgactgtcatatgtaaatctgggaacaggttgaatagtgactgatttctggacccagctcagaggcacagtgattagttgcattacctggacctagccaataggagatatgttgactcttataggtagccttcaagcaatgggcaaggtcctgggctttctacttgtatgaaggtcacagaagattgtaaaactcatgcatgttgtatgatcccttccaatggtacagagagtgtcataacagtttccagcacacagttaaaattgtgattctcagctgggggcagtggcgcatgcctgtaattccatcagtttgggaggccgaggcaggcggatcacgaggtcaggagatcaagaccatcctggctaacatggtgaaacgctgtcactactaaaaatacaaaaaattagctgggtgtggtggtgggtgcctgtagtcccagctactcaggaggctgaggcaggagaattgcgtgaacctgggaggcaaagcttgcagtgagctgagatcgcgccactgcactccagcctggacaacagagtgagactccatctcaaaaaagaaaaaaattgtgattctcataggcataccctgccaacaatgagggctgtcattctcacaaatggaaaaagacttctggtttggtcctaaatatcacatgtggatgcagtccacagttgaaattgtgactgttatatttggatctggccacaggtaaaatggtgactcacttctgtatccaactcacaggcatagtgagaactctcacacctggatctagccaataagagagatgttagctctcattcctgggcttaggacaatgggtaagattatgagtttataccagcacatagatccaagagtgggttgtggctctcaggcataccgtataaagccctcaggtgtcaccaagagtgtggtaacagggcccagtgcacaggtgagatagtgactctggtatgcacgcccagttcacagtaagaattttcaccttcttaaatagccacagtccactgttgaggttctgaatctcaaactcaaaggagctgaaagttagaattgtgactctcatatgaggatcaggtccacagacgagatagtgaatcttggaccaacattcaacacaccggtgaggctgtgactcttctaccaggacacagtctaagaattgaggctgtcatgcacaaatccagtctactattgagattctgactcgcatacttagaccaaacactcagaagatcttgactatgatctctagagctggaagtgtttgggattgtttatctcatccctgaatctttctgcaggtgtgattgtggcatatgtctttgcccataccctgagtgattttagtttcctgcctgagcccagcccatagatggaattgtgacatataccaaggccaagcaccaaggtaatatgactcttctcatctgcctgaacctgtcacttagaagtaattgtgacatatttctgaatccagcacgtgggtgatgtgactctcctcttgtgcctaggccttgcctacaagaaagattgtgtcatatcactgagcccagcacctatgtgatgtacttcttctgccatagttctccccacataagacactgtgacatatttctgggccaattacataagttaaatgagtctttgcttatgcctggatctcaccctcagaagaacttatgacatgttgctggacccagcacctaggtaatttgagtcttctctgctgcctggcccctgccaacagaagggattttaaactattgcttaaactagcacataaattttgtgactcacttcttttgctaagccctgctaaccgtgggaattacaacatattgctgaaaccaggataatgcaacaatcctctcttgcctgggccttgcccacagtgggcattgttacatattactgggcccatcttctaagtaatgtgactgtcctcttctgcttgggacctgcaacatgaaagactgtggaatatcgctaggcccagaacccagttggtgtgactctcttctttcttgatcctgctcatagtgcagattgagatattcctgtcctagcatccaagtgatgtgactcttcttcctggttcctagctacaggtgggattgtgacatatgcctgggacgtggtcactggtacaatgatgacacccacaaacttcaacccacaaaccaggagaaatattgattctgtctgctaggctttgggcaacaggtaaagtcttcgtctgttacttgcatgaaaggtcagagaaaattacaatactcatgcaaattgtataaagctttcagctggtgcagagagtgtcataacaaagcccagcacacaggtgaaattttgactctcaaatgcacacccagccaatagttagaatttttacccacacacatgtttttagcctacagttaaggtcccaaatctcacatgtaaatgctgttcacagttggaattgtgactggtatatgtggatctagccacaggtaggatggtaattaacttctgaacccaactgacaggtgtaatgatgactctaatacctggatgcagcaaattagagagaggttgactctaatacctgtgcttagggcaagggtacaatcatgggtcataacagcacaagagtctcagagcagattgtgactctcaggaatattatacaaagcctttgagtggtacatggaatgtcatagcagtaccaatcacggaggtgacattgtgattcttatatgcacacccacccaaatgtaaaagttgtcaccctcccacagggacactgatcaccttgaggttctgaatctgacactaagaggcaatcgaaagttaaaattgtgactctcatatgtggatcccatccacaggtggggtagtgactcttgagaaagaattcaacatgccggtgagcctgtgactttcataccaggacaccgtccttgggtgggattgggactctcattcacagatccgatatatcattgaaatggtgagtcctgtacttgcacataactcacaggagatgttgactctcataactaaagctgagacatgtgcagaattataaatctaaccacagaagcttcatgaatgtgtgatttttacagacctatttgcctagcatttgagtaattccactcgtctgtgtaggccaagcccttagatggtgttgtgacatgaattgagtcaagaatctaggtgatgtaactttctttcctgggtgctgccctcaaaggagattttgacatattgctgggcccagcacattagtgatgtgattcttttctcctgcctggttcctacacactgggagcattgtggcatatcactgagcccaacacctaggtgatatgactctcctcccatgtctgggccctgcccacattagggatggtgacatatcactgggcccagcacccaggtgaagtgaatatcctctcctgtttggcttctgcatacaggggcatggtgacatactgcagtgcccaacattatgataatgtgattttactgcatgggcagtgttcacaggatggtattgtgacatgtaagtggacccagcacctagataatgtgactctcctctcctgcccaggccctgcttatagagcaaattacgacatattgctgagtctagcacctgggtgatgtgactctcctgccttagccttgctcacaggggacattttgacatatctttgggttcatcacctagatgatgtgactctcttcttctgcctgtgctttacccacaggaaagcttggatcatatcactgggctgagcatccaggtaatctgattctgtttttgagccttgcccactgggggcattgtgacatttcactaggcccagcatttaggtgatgtgactctcttgcctgggtcctgcccataggggaactgtgacatatttctggtccagtgcccaggggatgtgatgctctagcctggtctctgctcccaggtggaattgtgacatatacctatgcccggctaacagggatgaagatgactcttgtacctggactcagctaataggagagattgtaactttcatagccaacattagggcaaccagtaatgtcctgggtttcctaattgtatgaatatcaaaaaggattacatcacttactcatattacataaagcagtcaagtgtacagagagtattataacagggctcagcacagaggtgagattgtgactttcatatgcacacccaggcaacagttataactgtcactctctcacatggacacagcccactggtaaaatcctgaatctgactcatgaacacagttcacagttggaattgtgactatcatatgtggatacagccaccagtcaaatgcggactcgtgtatgaactcagctcacaggaatggtgataactgtcatacctggatccaaccaataagggttcattcacagttttctaatggctctacgaacaacagaaataaaaaaggtatctctttatggggtatacttatatgtagagaattttgctgccaacttatatataaaaaaactttcaccttgataggtaaaagatgaagggctaatgtgagtgagaagttttaaagaaacatttgttgcctcataatatcagaaacagaatattgatccactgcttttaacctacttcataagtcaaaaataacttcttcagaataggttaaagagcattgccagcaggccattactcttctgaatgggcatcatttgttagatcattttttccatggcttagcataaatgaagcaatggttaggaatttatcccccaaaatagggctgtatagcagattctaatgtaaaggctgtggttacacaataggtattaaatgttctaactaaagttgtgctaaataatagaatttcttttgattacttactggataaacagagaactacttgtgtaattgctaatacttgtagttgcacatggtagaatacattgtgtattacagagatgcagttgtaggggattaatgaacaggctgcttggttgaaatgagtagatcattatctagctaattatttaatctattggattttagttggttgttcatggggaccttggctaagaagcatggtttcaactattttttttttttgtttttttgtttgtttgtttgtttgtttgagacaaagtcttgctctgtagctcaggctggagagcagtggcatgatcttggcttaccacaacctccacctcctgggttcaagtgattctcctgcctcagcctccagagtggctgggattataggtacgcattactgcacatggttaatttttagtatttttagtagagacagaatttcaccatgttggccaggctggtcttgaactcctgacctcaggtaatctgcctgcctcggcctcccaaagtgttaggaaacaggccaccgtgcctggcctgtttcaacttttggcattattctcctgctagtcaaaatagtagtctcccaggccgggcgtggtggctcacacctgtaatcctagcactttgggaggttgaggtgggtggatcacctgaggtcgtgagttcgagaccagcctgaccaaaatggagaaaccccatctctactaaaaatacaaaaataaaattagctgggtgtggtggcacatgcctgtaatctcagctactcaggaggctgaggcaggagaatcacttgaacccgggaggcggatgttgcagtgagctgagattgtgactttgcactccagccagggcaacaagagtgaaactccatctaaaaaaaataaatgaataaaattgtagtatccctactgcaccgtattctctcaaaaattataaatgtttgcatgcagtcatctctagaatgttaaatagtctcttgttgactggcctgacagaaactcaaagacatatgtgactatgaagacaccataacctgtgaataacattataaggacaaaaacccgaaataatggaaattgagagtgccactaaggcctagagttttggtcacactctgacctacgtaagaacttcaccaaaaagccagggttttaaaaaacaaagttggcggggggtggtggctcacgtctgtaatcccagaactttgggacgccggggcgggcagatcacaaggtcaggagatggagaccatcatggccaacaaggtgaaaccccatgtctactaaaaatacaaaaattagctgggtttggtggcgcgtgcctgtaatcccagctactcagggggctgtggcaagagaatcgcttgaacccaggaggcagaggttgctgtgagctgagattgtgctattccactccagcctggtgacagagcgagactccctctcaaaaaaacaaaacaaaacaaagttattggaggccatcgttctaaactgagcttgtacactagttccaaacagaccaaaccaaaccaaaatgagtcacctgtgctaaatgtgacataatccaactgaaaattgaagaaaataggtagatcctaaaacaggccaggtttatatttttcttctggaaacagcagatttcaacacaaggaagccccttctaatcctttaaaaaataaataataggccagacacggtggctcacacctgtaatactaacactttgggaggctgaggtgggtggatcacttgaggtcaggagttcaagaccagtctggccaacatggtgaaactccatcgctactaaaaatacaaaaattagccaggcatggtggcaggcacctgtaatcacagctacttgggaggctaaggcaggagaatcgtttgaacctgggaggaggaggttgcagtgagctgagattgcgcccttgcactccagcctgggtgacagagtgaaacttcatctcagtaataaacaaacaaacaaacataataaaataaccggaagcccatgtttctacttaaaaaaaaaaaaaacacagttctgctattttacagtaggatttgacactacgtaagtactcttttttttttttttgagatgccgtcttgctctgtggcccagactggagtgcagcggcgagatttccgtgcactacaacatctgcctcctgggttcaagtgattatcctgcctcagcttctggcgtagctgggattacaggcacctgctatcatgcccggctaatttttgtatttttgtagagacagagttttaccatgttggccaggctggtcttgaactcctgacctcaggtgatctgtctgcctcggccttccaaagtgctgggattacaggcgtgaacaaccacgcccggccaataagtacatttttgatgacaacagagtgatatcaatatctaaagttttgatatatctctcaaaattgagaagatgaccaaaagggagaaattgttaaattaattatattctaatgctgccactttcatgtttaatttttttgataggttttttttcatactaaactgaaacctaacttgataaataaatagactgtacccattcttgtaccagccacattgtattggcaaatataagaatgtcaactgttcaaatcacgttcaaataaggcaaattctaagctgtaatcaatatggctctttctgtacatccttgaattttctgtatgccactttgctttttccaccatgtagctatgctggagtatctctgagcctactctggatccacagggtatctgatttgcaaatcattttttgctcagtttaagcctgttaaatttaatttctctaaagttttttttttcttttacaagttttgaaattatgtctatgatgaaaaataaataatattcttgggctttgactttttaagcttatctctcagcttttctttcaaattatcctatgtctgttcaaaatgctcctgcaattttttttgagacagtgtctcactcttttatcctggctagagtgtggtggtgtaaccaattatttctcattgtagccttaattgtcttggctcacacaatcctcctggttcagtaacctgggactacaggcaggcaacatcatgcctggctaatttttaaaaattgttttcatagacataggatcttactatgttgcccaggctgtacttgaactcctgaacccaagtgattctttcaactcagcctcccaaagtgctaggattacaagtgtgaggcgccgtgtgcttctgcaatttcttgacaggactattctcaataataaagagtactacacaggcacaaatctaaaaaaaaaaaatccagcttctagtgtaaaagtataattctccagtatttcatgggtctgcagaagccccatctatggggcagcattgatcaacaaattcagtttattctgagtttcagcccagccacttagtaggtgtgggtctttggacaagtttcttgatgtaaaagagttgtataaaccacatatgcaaaaaaggcagaataatattgattgtaaaaattgcagcaatttttctttttttctttttctttttgagatggagtctcattctgtcgcctaggctggagtgcagtggtgcgatcttggctcactgcaacctctgcctcctgggttgaagcaattctcctgcctcagcctcctgagtagctgggattataggtgcgcaccaccatgtccggctaatttttgtatttttcttagagacagggtttcgccatgttggccaggctggtcttgaactcctgacctcaggtgattcacctacctcggcctcccagagtgctgggatgacaggcgtgagccaccgtgcccggccatagcaatttttcacccctcctatatccatgcccattgccagatgcttttacagctgctcccattgagatacagaatctgttttacaaagcttaaatctggctgaccttgtttgctcaggacagtagaaacctgagaaccgacagtgtgctagtttggtgaagggctgaaatggtcttgaatactacctttttctttttaaagtttggcaatggccgggtgcagtgactcactcctgcaatcccagtattttgggaggccgaggcgggcggatcacctgaggtcaggagttcgagaccagcgtgcccaacatggtgaaaccttgtctttaataagaatataaaaattagctgggtgtggtggcggatgcctgtaatccaagctacccaggaggctgaggcaggacaatcacttgagactgggaggcggaggttgcagtgaggcgagactgtttgaatgcactccaacctgggcaacagagcgagactccgtatcaaaaaaaaaaaattaaaattcacatgtggctcacattttatttcagaagattgcctttttaaaaaaaatcttggccgggcgcgatggctcacgcctgtaatcccagcactttgggaagccgaggcgggcggatcacctgtcaggagtttgagaccagtctggccaacagggtgaaaccccgtctctactaaaagtccaaaaattagccgggcatggtggcaggcgcctgtaatcccagctactcaggaggctgaggcagaagaatcgcttgaacccggaaggcagaggttgcagtgagccgagatcgtgccacggcactccatcctgggcgacaagagcgagactctgtctcaaaaaaaaaaataataaataaataaaatcttaggctgcctctttaaagaactgaagccaggaaggtcataaaagccgaaattttaaaatagctgttattatattcttttcctttgtgaatagccatattcaaacaaagttaatggcaaatcccctctgaggtgggcctggctcatttcagggaggaagccctgcctgaaaacgccacagcttaggctgtcactctttcttcattgaacccagcatctgatcacatcttctgtcactccaggcctgaatgggcggggccttaaacggcatccattcagggatgcttgactaagagccgtccaatcagacccgcagctagagcggacagggcggcttccgggatttggcgcggccttttgagttcctggtctctgtggcctcctgacctacatgcattgggagatccacagctaagacgccaggactccctggaagcctagaaatggtgagagtaccgggtccgacatcccgagagaggggaagggctggttggaaccggtgggaagtggctgtggcgggactcaggcctccctgctgtcagccccacaatctgcgctcggagttctagcctggcccggcctcagacaccttcagcgataagatggcggctgtactgacagccgggcccgagcgtcttgtctcttccctggcagtgaccgtgccctggcctggagccctctctgggcagctctgcacccgcagcgccgagtctctcccagattgtgcagggaccaggggagggtcgtcaggggagaatcctgactcgggtgaggagttcctgaatgggagcagctttggtccgtggggttcctagttcatcttttctctgaaatatttatgggagtcatcgcaaaaatattaaagaatttaaagagttgttcaaaaattatagagcacccctatgggttgtagtttgtggtccattagaggggcttgaagaaaagacttttataagatgcatgatgaaaaaacccaaattctgtaatcaggcacagttacgtagtttcctaatttccaccttgagcctacaaatttcctgattatgtaatcagagcttaattagctgtttatatttggttaagactgaatttcgtttcctctaatgtagtaattttttaaaaataaataaatgcatttgagttagattttttttttaagtaggaatccagagagtagatttccacctcagcctaattccatatcacttaactattttcttttttttctttttttgagacggaatttcactctttcgcctagactggagtaccgtggcgcaatctcggctcactgcagtctccgccttcctgtttcaagcgattctcctgtctcagcttcttgagtagctgggattacaggcgcctgccaccacggccggctaatttttgtatttttggtagagacggggtttcaccatgttggccaggatggtttcaaactcctgacctcgtgatccgcccgcctcggcctcccaaagtgctgggagtacaggcgtgagccaccgcttctggctatgccctgcatttttcacatgtttttcaagaagggtctcaaatgtaccccccaatcctcctttactctagcctaactgtggcttaaagtaaaatactaaatttccagctccttctgacaattccaaacgctaacttttcctccgtaataaagattattaattttttttttcttttttgaaacagagtctcactctgttgcccaggctggagtgcaatggcatgatctcggctcactgcaacctccacctcccgggttcaagcgattctcctgcctcagcctcccgagtagctggattataggcacgtgccaccacgcctggctattttttgtagagacggggttttgtagagaccatgttgggcaggctggtcttgaactcctgacctcaggtgatccacccgcctcgacctcctaaagtgctgggattacaggcgtgagacaccgcgcccggccgctatttgttttttagcgtacttttttttttttttttttttttccgagtctccttctgttgctcaggctggagtactgtggctcaccgcaacctccgcctcccaggctcaagtgattttcctgcctcagcctcctaggtagctgggattagaagcatacaccaccacgcccggctaatttttgtatttttagtggagacggggtttcaccatgttggccaggctggtatcgaacacctgacttcaggtgatctgcccgccttagcctcccaaagtgctgggattgcaggcatgagccactgcgcccagcctggtgtacattcttgataatgtattttaattaatctttttttttttacagcgcattggatggaacatttaaagagattcgttttctatttttaagtcttttcctttagaagaaagcaaagaataatccccttgcaatgtactgtaaataaatctttgtgtgtctttctctttatcttccctaggcacagagatcttatgagaacgttttggggtaattttttttttttggaaactttatggggttttgtgtccgcagtcaccatttagtgtttttctccttctggattttagtactctctgtgaataaacgaagatactgtgtctatgtctgctacagtgtctaggtaatatccgctcctgggtcgttttctgccataggacaacctgaggtatggagtgtagcctctccagggaggaagttgatgccctggggctgagaggcatctcctggcatattcttcctttgaaaagctgacatttagacattaagattgtcttcacctaacccatcttccatttcttggagacacattgctggtcagccaatcagatgctggtactgagagcaaaacagaaataatttctgccacctggattctctaagatttgtgaaaaaaaaatagtatccccaaagacaggaaaaaaaacctgaccccagtgagaaagtgcaagaatttgcaaagtaaactgcacttgaggcactcactggggcatagtgcagtgtctcctcagagggggtcattgagcatttaactgagcagggtggggtgggagaatctaagtgattggatgacctgacttgacacatgactgagacacatctgtgtgtgtgattttttttgtttgttggttgtttttttttttttgagatggagtttctctcttgtcacccaggcttactgtatcctctgccttccgggttcaagcagttatcctttctaagcctccggagtagctgggattacaggcgcctgccaccacacccagctaatttttgtattttttagcagagacggggtttcaccacgttggccaggctggtcctgaactcctgacctcaggtaatccacccgcttcagcctcccaaagtgttgggattacaggcgtgagccaccacgcctgtaatccctgggtttgccaccttgaaaagatttgtttgcttatattgacttcagtttcttaactgaaaattgcattttattagtagagcttgaaaggttaaaaagaaaatgtttacaaagggcataaaagaggtgagtttcaaaatatattccatttgttaagagttcgcatttaccgttttttttgtttgtttgtttttgtttgtttttcccagaatgagtttaggaaacttctcaggtgtgtttttatgggtaatttcaaacagaattccaaggcttagattttgtaatgctatcaaggcaaataatagggaaatctctcttttattttggctgtagaaaataaatacatttccacaagaaaatgtggtagataattggtgagttgcatagattcatgaaaacaacagtttttctttctgtatggtaaatttctgacagtgaatatttttgttctatagcctgtgatcttgatttctgattttaatgctaaatattacaagatgaaacttggtacctcttaggaatgttcccatatgattgtttactacataatttttaatgcaaataataaaataatacatttattgtctgaaaggaatagatactttgggttttcttgttgaggtatgaaatgtaagcaccttaaaatttttttccttcatatgaacactgtgtttcagtaattttgctagatgttttagttttaaaaactgagtaaataactgacataaaaattgaagcttgagcccagggactccaagctaaggctaatattgagcctgcaaaaggaggttattaaaggcaccgttagttcttcctggggagcctccgctgcagatttcccagcctgctcaccctagccatggaagaagcttttattccgagagaagctacacagccctggaaagctggggaccctcaggcagacgcagttaaggttaagatggaatgggactgaaaggatctcactgaagataaagttattcttgctttgaggcagtttctagacttttagaaataaaacaaagtcagatttatgtaaaaaaaaattaaattctaaaggagtattgcagcaggaggaagtaccaaccataagatatttaaggattgcaaaggataggcagacaagggctttcttccataggaaggagcaaataagattagaaagaaggtggtaggggaatggcaaatggagggtgaaaaatcagattctagatcacagaatattttatcctgaagtcagcatgttcttagaagggacataaaattgggtttattttggctcagactgagaatagctcaaagttcaggagctgtgggaagaagataaacttaagtgaagtttgattaacaagtattctattttgaccactgaagacaaattcagccaatttttctatgagaaaaagatttgcagagtctatgtctggctgtgataggtaagcacaaaaaggatagagaattttatttattatagctatttaccaggattatctttatgcttcatctttcttccatttgacatttcctgggttgtatcttttattataaactggtcagcataactgcagtgttttgctgaggtctgtgagtagctctatcaagttattgaacttgagggagattatggaagtccccagtttttaaacagtagctcagaaacacagatggggatggcacgattactcatgcctgtaatcctagcattttgggaggctgaggtgggcagatcccttgaagtcaggaattcaagacgagcctggccaacatggtgaaaccctgtctctactaaaaatacaaaaattagctgggcgtggtggtgtgtggctgtaatcccagctacttgggaagctgaggcaggagaatcacttgaaccctggaggcagagattgtgccactgcactccagcctgggctacagagcgagactctggcttaaaaaaaaaaaaaaagaaagaaagaaaaaagaaaagaaagaaagaaagaaaggaagaaatgtagatgggcccatggagtttgtgactggcatctgcaataaggacaatattgtgggactgagccctgaaccaaggtctgtgctgactctgggtggtttcagaattcaaatgttagacagtgagttggtgttgaagaattgtttggtgttaacaaacaatttggtgccagaaaaaatatcatggaggcctggcctggaataaaactctgggcgtgtgggaaggagaggctctgctttcctgtacacaggccgtcacactgctcattgttctgtgattccagatctcctcttagggtgagagaggactgaaaacttagagaaaaggagttctgatgacagaccccatttttccacagctgccaccacaggattcccacccactcacagtcatgcccactggacattgacatgtgcacagcccttccaggactaggcaccaccctcaaaaatttaaccatggcatttttgatcctagtgttttttgccaaaatcccacaaaattgtctacaaatttttggcatatccctacccccagacactgaatctgcagcagcaacctcttttctccaccaacttggggttctgggccacctgttcataatctcacctgcctgcatggacccagaaataagtagcacaagccagtcctgcctacactgcactcttctccacccattgagttcctttctcttaactcttatttttgttttaggggtacacgtgcaggtttactatataggtaaaattgtgtcatggaagtttgatgtaaattattttgtcactgaggtactaagcataacaccaaacagatttttgttttttaatcttctttgttctcccactctccacccccaggtaggcctcagtgtctgttgttttcccctttgtgtccatgtgttgttattatttagctcttacttagaaatgagaacatggagccgggcacggtggctcacacttgtaatcccagcactttgggaggctgaggcgagtggatcacgaggtcaggagtttgagaccagcctgaccaacatggtgaaaccccgtctctactaaaaacacaaaaattagccgggcgtggtggcacacgcctgtaatcccagctactcaggaggctgaggcaggagaattgcttggacccgggaggcggaggttgtggtgagctgagatctagccattgcattccagcccggtcgacaaagctagactctgtctcaaaaagaaaaaaaaagaacatgcatttgcttttgtctttcagcattagttttctaaggataatgggtcatagtttcatccatgttgctgcaaaaaacatgatcttgttcttttttatggccacacagtattccatgatatttatatactatatttttctttttatataaatattctactttattttcttcttattttattattattattttttgagatggagtttcactcttgttgcccaagctggagtgcaatggcatgatctctgctcaccgcaacctctgcctcctgggttcaagtgattctcttgcctcagcctcctgagtagctgggcttacaggcatgcgccactatgcctggctaattttgtatttttagtagagacagggtttctccatgttggccaggctggtctcgaactccttaccttaggtgatctgccctcctcggcctcccaaaatgctgggattacgggcatgagccaccacgcccggccttctagaaatggggtttcttcatgttgccttggctgttcacaaactcttgaactcaggcagtctgcctgcctcggcctcttaaattgctgtgattacaggcatgagccaccgcccttctgtattatattttctttatccagtttaccattgataaggattcaggttgattccatgtctgtgctattgtgaatagttctgcagtgaccatgaatgtgcatgtgtttttatggcagaataacttatatttctttgggcatatacccatttatgagggtgctgggtcaaatgctaattctgtttttagttctctgaggaatcaccaaactgcttttcacaatggctgaactaatttacactcccaccagcagcgtataagtactcctttatctccacaaccttgccagcatgtttttttttggttttttttttttttttttgagacagagtctcactctgttgcccaggctggagtgcagtggcatgatctcagctgattgcagtctccacctcctgcttcccaggttcaagcgattctcatgtctcagcctcctgaacagctgggattacaggcatttgccaccatgcctggctaatattttttatttttagtagagatggggtttcaccatgttgtccaggctgctctcgaactcccggcctcaagtgatccacccatctcggcctcccaaagtgctaggattacaggcatgagccactgcgcttggccctgcatctgtaattttttgatgttttaattatagccattttggcttgtgtgagaaggtatctcattgtgtattttctttgcatttctctaattaatgatgagtattttttttcatatgcttgttagccacacgtatgcctccttttgaaaagcatccgttcatcttctttgcttcctttttaataaggttgtttgtttttccttgtaaatttatttaagtattttatggattgtggatattagttgtttgtcagcagcatagtttgcaaacatattattctattctgtaggttgtctgtttactctgttgatagtttcctttgctgtgaagaagctctttggtttagttaggtctcatttgtcaatttttgcttttgttgcaattgtttttaatattttcttttttctttttttttgagacggagtttcgctcattgcccaggctggagtgcaatggcatgatctgggctcactgcaatctccgcctcctgggttcaagtgattctcctgcctcagcctcccaagaagctgggataacaggcatgcgccaccatgcctggctaattttgtatttttagtataggcagggtttcaccatgttggtcagactggtctcgaactcctaacctcaggtgatccacctgcctcagcatcccaaagtgctgggattacaggtatgagccaccgcaactggcctgtcccgtttctttataacgctcatgtttctcacgctgagaatagttgtgcactttgggtatttaaagagaaatatttttttagaggaatattttctggtggacttgatcaatattatatctaatctgagttttgtttttaaagatgcttttaactttttattttctcttgatataatcttgctcagatggagagctgttttttgcgtgaattctttgggtttctgtttcagaagccctattagtatcccatgatatctgtgaatgaggtgggctgtcacagggagaacttagacctatctctatccggactcatgctggaaatccagcagtacttttttcatgtcaccattttaaatagaagctgaggctgaaacactgctcccattcccattatcgtgaaggtgcagtttcacccaggaggcctgcaggctctcctcctgcagctcaggcttcattgtctgatgtgacactggagtgctgctgtggcaattggggttcatgtaagatgtgagctgccagctatgagctttgtgttgtgggctgtgtgtcaatggcagatagtaggcgtcaagagaggacatggccatcaggagagggcaagcagggtgctctagcccagtgctaaaggagttaaagagccattgctttaaaatataaatagccaaaaagataacaccctattcagccatttctgtaggagagtgggagcctaccttcagcaggcacttggcttcatgttgcagaattaacctcctgttatgaagatgtgaaaagtttattttgtcattgaatataaccaataagcttacaccgatggccttgccaattgccaggtgaatttaggatgaactacatatgacatggtgctgtaaatttttccacttgtggactaactgtggtgactgtctttctggcttgacgatctcttgagcagattgactgtgatgcgtgtcacattcaggttaaattgtgtaataaaacagttttctttctgttctatcattttggagtttttctggggctggagaaaatttttcttttaattatattttccacacactgtctagaattaccagacattatataaactcataagatgccaaccaagctttactctagaggagacttcctctcaggcttccagtcaactcacagatttctacaaacttcacagggtagcaatcaaccatttcacctcttttagtgactgttgtgtcttcagacctgaaactgattcagagaccagggggaccagaaacccaatcagagtaacatgtgagtgttgagtagacatgtagacatgagaatctccactctccccttcctcctattgctaaaatacccacaaatatgcaagtaacacctgctgcagatccaaattctgaatctaggtcttgagatctgggaaccaaaaaaaaagaaaaaaacaaacctttcatctgaggaatgcaagtccttttagttgtcaaactcagagagacattaaaatgagaacacaattttgtctttctcccacctttgaactatgttttgttgttgttgttgttgttttgagacagtcttggtctgtccccaaggccagagtgcagtgacgcaatctttgctcactggaacctccacctcctaggttcaagcgattctcctgcctcagcttcccaagtagctgggattacaggcatgtgccataacagctggctaatttttgtatttttagtaaagaaggggtttcactgtgttggccaggctggtgttgaactcttgacctcaggtgatcgacccgcctcggccttccaaagtgctggaaaattacaggcatgagccactgcgcctggtcctgaactaagagttttttttaatctcttaaaactgttaactgttgccactagtagctataaattaataatgccacactggacactataacccatactctaaattttaatgatgtatatccaatcaataatcaatgtcatttctgtaaatataataaaaatttctggtaaacaactttgtatcagccatctctctctccctctctttttgccttttcagatcaacttgtaactgctcctaatcaaagtgtagatgacaggcaacttgaaggtttgctcccaggttacaatcctcaagctttgcccaaataaacggtctacttacattcatgttgccttagctttttttcttttaggtagacatatctttcagaatgtgctaaagcagcctctataaggtgatctttcctttgattgtactctgcttgctgtaacacccaagaatgaagagccaggttgatcccacctagaatctgcaaataaggtctgttctcttcctggaatttacaagataaggccagactttgaattgagaatgtagagaaaactaactagacattttatgcattgtcagatgtcaacatagacatcttaaagttcctctttgagaatgtgattctttcagcttctcagatcttgtccagtgacctgctacagttatgtgagggccaccaggtataaatagaatctgatggcagaatacgtaagtgtgaacaagcatcttcagagttatagaaaggtgataatgtatccagagccataaccacaactacacctgtccctaaaatgtgggactggagtagaatattcctgttcttcctcttacctaagagctggataatcaggacaggtgatccaggttctggagcttctccagggcagtttaattttttgtttagaattagcctgagtctctcctgtctgttttatcattgggccatcagcccagggtcactgggaactctcacaataagctgggtgtctttgagacatttgaggatgtccagagcagaattgtgccaggttaacaaaagtggttaattctgcttctatctcagtgtaaaaaattgagtcttcttgtgtttgctcctccccttacacaagaaatgactttggtgggtacccagatgaatgtttctccagttttcagatacttgggtgaaaaacaaccaggatgtctggagactcaaacaaataaacaaattgcttttattttatatggcgattagaaaaatagatgaagcagtcatccaggaaccatccaggaacttttagactagactagcaactgaataaagggttgaattaagcatcatatggttgattcattgaacagatgtgtgcaaaaaaatttgcctttatttgggcccctttctttatattgtagtgacttcttatgtcatcacctgaagggatatttatgaacagaagagttgttattattatatgcgtttctattacctgctaagaatacatatttatcttctaataattaccctagagaaccttaagacatttatttaaattgcttattagtatgcattatataatggacagggcagtggctaaaaaaaattatacaaactctgagatttaagtttctcttaggcaagtttaggaaagcagaactggaaatacgccagtggcacagagaacagaattctacataaggtccactccctgccccagttctgttcagattcactctatttggggtcttgtttagatctggccccactctggagtcttgcctcacagaactgattggaagagatgagagttttggctggtgaatcctgctgcctttctaaagctggtacttacaattttctgaaccccaaaggagataaagggaaaaataaagtatgtattttaatgtcttaatttttaaattttctattaaatcagtgcttgcagattccatttagcatcttgttttctattcctgcagattcagtagttgctccactagtcacacaaaaaaaatataaacacaataaaagtttctctaaactgcgttaaacttttctctattcaggtaatttgtctacatttagcttttattgtatacattttctttaaaaaaccaagaacagaaacagaagatgaaatacatgtgctgggcccttaacctaatgctgggaattattaaatacttagtaccaaatcgcagtgtgttatgaggattaaatcacataatgtattattcgtattagtactctgcaacatactcttgagcacatagtacctgcttaaacattgcattagtacatgtgtatatgttgttttccaaatgtaggcttattcaggcactcctaccttttattgcctctgtaaactttaaagaaccagcaaagaatttgatgctttaggatggagattagttatcttcatttgtgccagaagtaattgtgttgtgaaaagagtacggagtttaagggactctgtgctgtgcctgctttctctaatgctaataatgagcccagggggagcatcatcagcattgacaggggacttagttaaaacacacattcatggccggcgtggtggctcatgcctgtaatcccatttgggaggccgaggcgggtggatcatgaggtcaggagatcgagaccatcctggctaacatggtgaaaccccatctctactaaaaatagaaaaaaaattagccgggcatggtggcaggcgcctgtagtcccagctacttgggaggctgaggcaggagaatggcatgaacccgggaggcggaggttgcagtgagccgatatcacgccactgcactccagcctgggtgacagagcgagactctgtctcaaaaacaaaacaaaaacactcatgtaccctttgaaaacctgcagaatcacattacataaagagggactaaaattactgagtggtttataagctcgttaaagcttgagagacaatgcttagctaagtggttataaacccagggttctattagtttggtgcaaaagttattacagtttctgccattgtaattaatgtggattacttagatgtggatactcagattacatggccaattcacagaaatatctttgctcgtgccctttccacgggttctttttattgttggacacatccatgttgttttaattaagagcctcatgtgattctaaggtgaggccagaatcacttatgaggggttgaagatacactcatgagagttcagtttcacctgtttactacagggtgattatagggcctgttctgtttgggtttggtatggacagggcagtgtggcccatatttttattactgtagcagagattgttggtgtctgtagcaggggagggcacctaaagagaggaaaggagaaacttttatttcttcttcatggggaaactcattgttcctgaatttttcatgttataaaggacagaaatggatggactttttcagcgggtcttggtacttctgcctgtgggtgtggtggtagcaggtaaacaggtggtgctgacacctttaaaggcatattctcaagatgcaggtctaatttgtccagagaatctcaactgaaaaggaatcccagagaaggaggagatagggaaaaaatatgccttttttttttttttttttagctaaacacatctcagatcaagaactgcgtccactctgcctcgtggatttccatgcatttagtacttgcaaacctttacttctcttgcgtttttcctccctaatgagtttgttttaactacttttgaaaattttattgatagtcaagggtctctgaacaatatttctttttagagccttttctaagttctccacatcatggctttttatatgccatggaggattctcaccattaatttatgatctgcagtattaaaaatgtttcctttgtggctgttgaacatgggagggtggggatactcaagattcctgttggggaaaagctggtatccttagtaaagatggagaacaggtactgttgaggctccatttgtgttccccattagcactatgcagaacgggattaaggaaatgcttacttaaacaagatgacggccaggtgcggtggctcccacctgtaatcccagcagtttgggaggctgagcaggttggatcacctgaggtcaggagttcaagagcagcctggccaacatggcgaaacctcatctctactaaaaatacaaaaattagccaggcatggtggcgcatgcctgtaatcccagctacttgataggccgaggcaggagaatcgcttgaacccgggaggtggaggttgcactgaggcaagattgcgccactgccctccagcctggatgacacaatgagactctgtctcaagaaaaaatgatgagatttattacccagaaagtttgaaagataattatcaggagataactgctctctagggtgctcaaaaaagactccttaaaatcactactaaaaattacagaaaatgggaaatatctgtatcttgaattttgcataaaactgatgtttctgtatggttgcattcagcctataatttccttttttttttttttttttttttttttttgagatggagttttgctcttgatgccgtgctgggattacaggcatgagccactacccccaaccagcctataatttactttttgggaacaatatttcagcagtgatgctgtgttatgtgtgtatcagcacatcatacaaatttttcctactgctgttgatgtttatgattcacttggataagcactctctgacagatttttttttttttttactataatttttttctttgttattttattttattattatttttgagacagggcctcactctgttgcccagcttggaatgtagtggcgtgatctcgactcactgcaacctctgcctcctaggttcaagcaattcccctgcctcagccttgcaagttgctgggactacaggtgcccaccgccatgccagactaatttttgtaaaggcctttttttttttaattaagtatctttatgcagctgatgtgtgtaaactatcaaatttaatttggcagctgctctttcttagagtttctttgcatatatctgtccttggaaaatgaagagtttcatcttttatagtccagaaaaactggaaaaaacacaggttcttccatatactggatgtttgataaaatattcttcttaggccaaaatcattggcattattggtgagcttgttagaaattcagaaactcagactttattccagatgttctggaaaaaaaaaaaatctccattacaagatctccagtttattgtacacattaaaatttgctaggtaccttctaactcaacatgtcttttccatctcaaaaatacacagaactcattctctatgatgttaatatagcactcaaaaatatacatgcttgtgttaatgcctttaattttatactttattatccagaaaagtatcatatatacactgatgttgtggatcttattccactctttttttcagaattagagaatacataagagaatatttctgtgttgaaaattattttcggccaggcgtggtgtctcacacctgtaatcccagcactttgggaggccaaggcggatgcatcatccgaggtcaggagttcgagaccagcctggccaatatgatgaaaccccatctctactaaaaatacaaaaattagctgggcgtggtggtgggtgtcttgtaatcccagctacttgggagactgaggcaagagaatcacttgaacccaggaggcagaggttgcagtgagccgaaattgcaccattgtactccagcctgggcaacaagtgcaagactctgtcttaaaaaaaaaaaaaaaaaaattattggaggatttcagtcattcctataagtcagaacctgttctctttactctctcatttcaccttcagtcaaattaaaaattctgccgttggccacccggtaaatatgtgtgtatgtgtgtgtgtgtttttttttcagggaccattgacattcacagatgtggcaataaaattttctctggaggagtggcaattcctggacactgcacagcagaatttatatagggatgtgatgttagagaactacagaaacctggtcttcctgggtgagaataacttcaatacacaatcctcagatactgtaaatgtttctttttttggtgttgtagaatgttttttggtaattgatgctttgcataaatgagtttcacatcactgttttgaagaaaagcttgggaatttgtcagtgtagaaaagaatttcttcaagataaacatcttgaagttcaccttgatctgaactttccacattcctgagcagacctgtagtttttactcaccattagcgatcatttcaaaatttagtgacataaaatattgttgcccacaccttaacatctaagtgtcaccaccagcttttgattcagtggtactgggtagagaaattattttatttatttatttatttatttatttatttatttatttatttatgagatggaatgttgctgttgcccaggctggagtacaatggtgcgattttggctcactgcaatcctcacctcccaggttcaagagattctccagcctcagctttctgagtcgctgggagtagaggcatgtgccaccaagcccagctaatttttgtatttttagtagagatggggtttcaccatgttggccaggctggtctcgaacttctgacctcaagtgatccaccctccttggcctcccaaagtgctgggattacaggcatgagtcaccgcagccagcccattttctaaatattaagaaattactgttataaattactgttttgggatgaatatactagaatattctattatgttctctttactgagcacattatttgaagaatatgaggaacattcatgttatttatttttaataaaacaggtgttggtgtctctaagccagatttaatcacctgtctggagcaaggaaaagagccctggaatatgaagagacacaagatggtagccaagcccccaggtaggtggagagtgaacacaatggacaacacagataagacgtccaaaggtcaaggagaaagccagtccttaaaatagattttgggaagctgtgttccaaagaaaatagtttcaggaaagcctgagagtttaaaaaattttactctcacataggggcatcttctgcattgtgctattaaattttctaaggattctactttcccttttgtgatcttccttgaagtttacagtgacagccaaagtcttcttcatggcatataagagactgcacaatctactttttcatattttcaagggaaccataaatatctgcataattttataaaactctgttaggctgggcaaatgtctcacaccagtaaacccagcactttgggaggccgaggcgggtggatcacctgaggtcaggagttcgagaccagcctggccaacatggtgaaaccccttctctaccaaaaatacaaaaatttgttgctcgtggtggcgcacttctgtaatcccagctatttggtaggctgagtcaggagaatcgcttgaattaaggaagcagaggttccttaattctgatgtcgtgccattgcactccagcttgtgtgagaagagtgaaagtccatctcaaaagtaaaaaaaaagaaacaaaaacctatgttaaactgtttttcatgttttcttgttttatcgtgtttaaaatatgtgagagtagtggtttctgttccatttgttttttcatttttctgcataattcatcctgtttttattagtatagtcttgaaatacagtttggaattattatattaagtatgacatcctcctggtttgttttttttttgtcaagattgctttggctattcaaagtttattgaagttttatgtaaattttaggattgtgttttacattactatataaaagatagcactggaggctttttttgagatggagttttgctcttgttgcccaggctggagtgtaatggcaccctcttggctcactgtaacctccgcctcccggattcaagtgattctgctgcctcagcctcccgagtagctgggattacaggcacgtgccaccatgcccagctaatttttgtatttttagtagagccggggtttcaccatgtaggccaggctagtctcaaactcctgacatcaggtgatcggcccacgtcggcctcccaaagtgctgggatcacaggcgctgggtcttttttttttttctttttactgagatggagttttgcacttgctgcccaggctggagtgcaatggcacgatcttggctcactgcaacctccgcctcctgggttcaagtgattctcctgtctcagcttccccagtagctgggattataggcatgagccaccatgcccagctacatttctttttattaaattgtttaatttatatttaaaataattgcttaaagatatgaagttactattaagagtttattatttttttagatacgttttttctcatttcctgttttactgccttaatttttgtttaattttgttgtgacatgccttgcttattttttattctgtttcacatgctttctacaaatgcaacgcagtcatcctgaaatataatgtgatcatgttgaaaaatggagattacataaaacatcttaaagttaaaacaatacattttaatatcataacttcaattgaatacaaaacctatatctttatattttccagtttgttattgatattataaatattatcttgtgtatctattaataaatgtaggcagatttaagtgttgttttttctatttacagaagaagtttaagggttttatgcaccatcattataatagaattctatatgtgtctctatatttacatttaacagagagctatttatttatttatttatttattactattttttttgagatggagtcttgctctgttgcctaggctggagcgcggtggcacgatcttggctcactgcaaccactgcctcatgggttcaagcaattctcctgcctcagcctcttgagtagctgagattacaggcacgagcaaccacacccaactaatttttctatttttagtagagacggggtttcagcatgttggtgaggctggtcttgaattcctgatgtcaggtgatctgcctgccttgacctcctaaagtgctgggattacaggcgtgaggcaccgcgcccagcctatatacattttcatgatgctgtccagcatgattttatttttcaacataatggactcattttaggatttctttttatttatgtgcagtctcactgtattgctcagactaatcttgaactcctggtctcaagtgatctgactgtctttgcctcctaatgctatcggattacaggcatgagccactgtgcctggccaccatgtagcatttgttataggactgtgttagtggtgatgaactccctcacttttcatttgggaaagtctttatttttgtcttgtttttgaagtaaaataattttgaataaagtattacttgttagaactttttttttgagacggagttttgctcttgttgcccaggctggagggcaatggcgcgatctgggctcaccgctacttccgcctcctgggttcaagcgattctcctgcctcagcctccggaatagctgggattgcaggcatgtgccaccacgcctggctaatttttttgtatttttagtagagacggggtttctgcatgttggtcagactggtctcaaactcccaacctcaggtgatctgcccccttcggcctcccaaagtgctgggattacaggtgtgagccactgcgcccagctagaattttttttataaaatcaaaattggtaaagttctcagtttttgtttcttcaagtaatctctgtattactttttcttttatagtcttcttttaagatttctttcataaatatattgatctactttatagtgtccaataagctttacattgcatgtttagtgttttacaattttgtttctgtgttatatattttagaatatgccacctcatagcagttaattgtgttttgatgttttagtttatattatcattttatatgacaatattaaagtctgtacaatttaagaatggatagagcaaaatcaaatattagtctttcattcatatatctgtttccaatatagttatgtttgtttccctgtataaatattatctctatcttttatgactgtatattttttgtgtaggtttgttgtgaatggttgtttaatcttttctaggtaagctgtcataaacattttactagttttagcatctatttgtgaatatattatttttgtgtggggaaaaattttggacttgacaataatttaaaaacttatcagaactttattaggtattattgttcatttttacttgtcaaaaacacataatctttacagtcaaatgtttttaaatattcggtttagtcatattaatggtattgacaatgctatgcaacatatccctagaatgtttttatctcacaaagctaaatcttgacacattgaacagctaccagtttttttcatttcttggtgcttttcaaatgccactatgttttctgtttttaacagtgtaactgctacatatatctcattctatctctgactttttatgactggctcgtttcattttgcataatatcatcaagctttatctttatagttgttaagaatattttctgcttataaatcctgagtgatattccagtatttttatatttcaaattatttctactgaatgatttggtgacagaaatttgcattgcttttagttattggctttcagtaaaaactgtaataattatagatatgcaaatagctctttatataactatatatatgacagtttatatatgtgctgcattctcttttattattctgctttttaacttttatattcatagtaaattgttttaattctgtagctcgtaatgtgttttgaaatcaggaactgtaatgccttcaacattgtttctttttttgaagattgttgagtattttattttctcttgagattccatatacttttgctattgctgtttacattttttcaaaaatgcagttagaaatttagttaaatatcattaaatctgtagattacattgagcagcatggacatcttcaaaatattaattatttcagtttttgaatagatgcattctccagagtgtgctgtttaatttttatatatttataaatttttcaggtttttttctattattgttttataccctcattccattttggtcatacaaagtaatgcataaaaattttgttttatgaaatttgttaagacttttttcaaggagaatcttgtaagatcgtgtgagtatttatttatttatctgagacagagccttgctctgtcacccaggctggagtgcaatggcctgatcttggctcagtgcaacctcctcctcccaggtgaacctgcctcagccttccaagtagctggaattgcaggcacctgaaccatgcccagctaatttttgtatttttagtagagacagggtttcaccatgttggccaggctggtctcgagctcctaacctcaggtgatctgcctgccttggcctcccaaactgctgggattataggcttgagtcatcacaaccggccatatgagttattgagaagggtgtgtatcctgatgttgaggagtgttctctatacttcttttagaaataaatgttttatactctcttcaaattttctctttccttattaatattctatcttgttttatttttattacagaaagtggcgtattaaaatatcctactataattatattgctctctatgtgtttctttaattctgtcaatatttgctttatatatttgaaagccaaatgtgagatacacacacacacacacacacatttgttatgtttacactaaatgactctattattgttaatttccttctttgtctccatatagttttgacttagaatacattttataaaatatgacactttgacttcagatatagcttatgtaatattattttgatctcttcttctctcatttggttagtatctgcatagaatgtgtatgtccgtcttgccactttctgtctttttttatcattaaatctcagctgactcttgcaggaaagtaagttggattttgggttttaagattttttaaataaatccttttattgaaaatatgtctcttgattggaaaattaattgtatatatatttaaataattttctgaaacaaaaacttaataatgttttattgttttatttgattcttgtatctttgtccctcattttctctctttctgccctcttttgtgtctgtttcacttttgtattaatatgcttttacttcttgtttttttcatctaaacatatattctttgtggtaccttggggattacacaaaacctctaaaagatatgagaatatattttaatctagtaaaaagtgaacttcagctgaatacgaaaatgtttctttggctgtgcttggtggtttacacctgtaatcccatcactttgggaggctgaggtggacagatcacttgaggtcgggagttcgagtccagcctgaccaacatggagaaaccctgtctctactaaaaatatgaaagtttccaggcgtggtggcacatgcctgtaatcccagctactctgtcagctgaggcaagagaatcgcttgaacccagaaggtggaggtcacagtgagctgagattgtgccattgcactccagcctgggcaacaagattgaaactccatctcaaaaaaaaaaatattcttcctcaaattttttatttttatattctctagaattctttaaattttatagaataattacaaatgttttctgcaccgttataacaatggtaggaaatttcatttttatgtaagtatgtacatatctttcctagaaaataatgtatttttatatgattatgtgttttcttttttttttttttttgagatggagtctctctctgtcacccaggctggagtacagtggtgcagtcctggctcactgcaacctccacctcccgggttcaagtgattctccttcctcagactcctgaatagctgggattatagacacacaccaccacacatgtctaatttttgtatttttagtggagatggggttttgccatgttggccaggctgatcttgaactcctgacctaaggtgatccatctgccgtggcctcccaaaatgctggtactacaggtgtgagtcaccacacctggcctgtcattttcttgaatcatattattttcaatggaagaaactgctttcagtatcttttatgtatagggcacatgcagtgccaatatactttttcagaatttgattactttggaaggtttttttatttttggcaggacagatttgctgatggtattattctcacttgataggtatttttccaggactttgactatatcacacagttcccttctggcctccaaaatttttgttgacagttcagtggttatctgaaagcctgcttgtaagtgatacatcacttttttcttgcagtttccaagattctctttttgtctgtgacttttaaaagtgtgcttatatatgtgtttgttataagtatctttgtgtgtttcctagtttgtttgttgagcttcttcgtttttattttatctttcttttagaatttttttgtttgtttgtttttgttttttgagacagagtcttgctcttgtctcccaggctggagtgcaatggcgtggtcttggctcactgcaacttccacctcccaggttcaagcaattctcctgcctcagcctcctgagtagctgggactacaggtgcttgccaccacacccagctaattttttgtatttttagtagagatgaggtttcaccatgttagccagtatggtctttatctcctgacctcatgatctgcccacctcggcctcccgaagtgctgggattatagacatgagccactgtgcctggccagaattttttagttataatttctttttgtattttttacctccacaatttctgtttttttgatatttcatacttttgttaccctcatttttctgtttttctgtagttgtctgtgtttccatttcactcgttgagtattattcaatttaggacattattaaaatctacctgttacataatttatggcatagtctgaaaacaattgtcttggttagagattttgggagtctatcaaacaggttcttatgatgtgtcttgtctgaatttagtttttactttctagttaaaggagtttattcatgtttctttatattcatcgcttgctacacctgttccctgcctgtggtactgcagtttctctgctgctgtaacatttacatttagtctcagcaaactcaaagggtcacttcaaagtatatgaccagttattttagcactttatgtcattggaaacagaaaccaagtgtctggaaaagcccctcaaagacagaaataaagatgtatgtgccagtattttacttgtcttttaaaaaagaattcaggagcttacaatttacttgtaaaggctctttgctatattggggagcagaaagagctgttttgggtagatgcaataaacttttctcttcattctatgaggctctttgtggcactgcacatacttaactcatttatacattttccacaaatgtattttggtctgtatgtttttgttacatttatgtctatgaagtaattatggcctatggtattttgctatgccatcttatgtagtttgtataattttatagcttagatttgtaaagtatatccatctgagtctagtaagatgaagtaatttgttatttctatttttttcagttgtgtgttctcattttgcccaagacctttggccagagcagggcataaaagattctttccaaaaagtaatactgagaagctatggaaaatatggacatgacaatttacaattaagaaaaggctgtgaaagtgtggatgagtgtaagatgcacaaaggaggttatgatgaacttaagcaatgtttgacaactaccccgagcaaaatatttcaatgtgataaatatgtaaaagtctttcataaattttcaagttcaaatagccagaagataagacatactggaaataattctttcaaatgtaaagaatgtggcaaatcattttgcatgctttcacacctaactaaacatgaaagaaatcatactagagtgaattgttacaaatgtgaagaatgtggcaaagcctttagtgtgccctcaaagcttaataatcataagagaattcatactggagagaaaccctacaaatgtgaagaatgtggcaaagcctttaatgtgtcctcaagccttaataatcataagagaattcatactggagagaaaccctacaaatgtgaagaatgtggcaaaacctttaatatgttctcaagccttaataatcataagagaattcacactggagagaaaccctacaaatgtaaagaatgtggcaaagcctttaatgtgttctcaagccttaataatcataagagaattcatactggagagaaaccctacaaatgtgaagaatgtggcaaagcctttaaccagccctcacaccttgctacacataagagaattcatactggagagaaactctacaaatgtgaagaatgtggcaaagcattcagccagtcctcacacattactacacataagagaattcacactggagagaaaccctacaaatgtgaagaatgtggcaaagcttttaaagtatctgtacaccttactacacataagagaattcatactggagagaaaccctacaaatgtgaagaatgtggcaaagcctttaaccaatcctcagcccttactacacataagataattcatactggagaaagaccttacaaatgtaaacaatgtggtaaaggttttagccaatcctcaacccttactaaacataagataattcatactaaagagaaaccctacaaatgtgaagaatgtggcaaagcttttaaccaatattcaacccttaataaacataagataattcatgctagagagaagccttacaaatgtgaagaatgtggcaaagcctttaacaagtcctcaattcttaacagacataagataattcatactaaagagaaatcacaaaccttaaagatgtgacaatgctttttatgaaatcccaaacttttttaaacataaaagaaatgctggtggccaggcacagtagcttacgcctgtaatcccagcactttgggaggccgaggcgggcagatcacctgaggtcaggagttcgagaccaacctaacatggtgaaacaacgtctctactaaaatacaaaaaaaattagccgggtgtagtggtgggcgcctgtaatcccagctagttgggaggctgaggcaggagaatcgcttgaacccgggaggtggaggttgcagtgatctgagatcacgccattgcactccagcctgggcaacaggacgagactctctcaaaaaaaacaaaaacaaaaaaaagtgctggtgagaactcatagaaatgtgaagaatatgagaaagcctttaaatggttgtctcacttgattgtaggtaagatactttatactggagaaaactcctacaagtgtgaagaatgtggcaaaacttttgactaatgctcacaccttggtgcacaggaaataatttatattttagacaacttgtacaagtataaagaatgtgacgaagccattaataactgctcacattttaacatcagagagctaatacaagcattaaaggtgcaattactgtcaaaagatcttccagaaaatataagcctttaaaatgtattaaatttattgctgtaaattcttatgtcttacagttcagaatctcttcatgcaaattctgtttttacttttctagtactcatactagacccataattttcttgattcttatttcgttttgttttataggttataaagtattcattatattagctggtcagtgattatagtaattgtttttatgaaatttagtagtgcacacaaaataattttcaaaggtaattccattagtgtattaagttttatttagtgttagaacattccattttgttcttttaagtgcagaaacttatataagcctacttttttttttttttaagatggagtttcactcttatcacccaggctggagtgcaatggtgcaatcttggctcgttgcagcctccacctcctgggttcaagtgattctcctccctcagcctcctgagtagctgggattacaggcatctgtcaccccgcctggctaatttttttatttttagtagagacagggtttcatcatgttggcaaggctggtctcgagctcctgacctcaaatgatctgcccacctcagcctcccaaagtgctgggattataggcatgagagaccgcacccagccaagccaacctttatttagttattttaaaaaaatttttaataattgacataaatacatttatttattgagtcaatttgtccaggtaagtactggggaagcttcataagttttgaggatatttttatacataaatatatcaaacatgagagtgcttgctgtataacagatgctccgtaatgcagaaatatttgtgttaaaattagtttgtaactttgattcggaaattaaaaataccattgggccaggtgcgatggctcacacctataatcccagcactttggaggttcgaggcgggcagataacaggatcaggagatcaagaccatcctggctaacacggtgaaaccccgtctccactaaaaatacaaaaaaattagccaggtgtggtagtggatgcctgtagtcccagctactcaggatgctgaggcaggagaatggtgtgaatccaggaggcagagcttgcagtaagcccatatggcgccactgcactccagcctgggtgacagagcgagactccgtctcaaagaaaaaaaaaaagaaaaaatattggctgggcatggtggctcatgcctgtaatcccaacactttgggaggccgaggtgggtagattgcctgaggtcaggagttcaagaccagcctggctaacatggtgaaaccccagcactacaaaaatacaaaaattagccaggcatgatggcaggtgcctgtaactccagctacttggaaggctgagacatgagaattgcttgaatgagggaggcagaggttgcagtgagccgagatcacgccattgcactccagcctgggcgacagagcgagacttttgtctcaaaaaaaaaaaaaatacaaacaaaataaaatatcaatgctgaagatataacattgatttttttcatgtggagatgacactttttttcaggcttcaaagctgaatcttgctgaatttaaagagaaattctgctgctttaatttcctaattatcttgattttttttcactttttatgtgtattctaactatgtatgcatcacagccctttttcttcttgctctgttatggctacagttttctctctgttatctccatgccatgtcatttcacatggtactttgtaggttctgaggagaaagttggtactttttaatgcattgaaaaattggttttaactagagagtttgcttatcaatataacttttagattaattaaaataaaagacatacactttccacaagaatgtatcagcatagaatatatcatatatcagtaagaagaatatatcagttagcatggttttgtttgtttataaaagaaaaaccttattagattctcacacaaagagtgaaaaatatagtgtgctaaaatatatatcttagaaattttatttttgagcaagttgactgcaagtgaacaatttcgaatttaattttataatatagcataacttatgtttctatacagtatcttcaacttttaagtgtgaatgttaaagttggcaaaataataaaatgatctctggatttgaaatttgatgtaatttttttttcatgttgctattacaatttggaggaatttctcactttttttcctagattgcagtttttactctttgtcacctaactgtagtcaactccctggtcattttctctggaaaacttttggagaacatggctgcttttggattaaaatatttcccattattttgcataaaaaacgagtttactgtgttcacagagtggctagtcatgggaccataagcaacagctccaacttttagtgtttttcatactgttaccatcaacaacagaaactccaggtaccccatgctcgaagtaaaagccctaacgtacattggctcttcccatacactctgctgggtccagaaaatgctgttaaatactagagtttctaagctgggcatggtggctcatgcctgtaatcccagcactttggaaggctgaagtgggtggatcacctgaggtcaggagtttgacaccagcctggccaacatggcaaaaccccatctttaccaaaaatagaaaaattaactgggtatggtggtgggcacctgtacttgggaggctgaggcagaagaatcccttgaatccgggaggcggaggttgcgttgagccaagatcgtgccattgtactccactctgtctctaaataaataaataaaataaataaatatcagagttcctatggtcatggctgacaaactaagtgacaaaaactaattttgatactattcagctgtttatgacaaagacagtatttgaaacattgttatatgtgtgtgtatatatatatacatatgtatataacatatatataatttttagacaagagtcctgctctgtcacccaggctgaagtgcagtggcatagtctcagcttactaaaacttccacatttcaggttcaagcaattctcaagcctcaacctctcgagtagctgggattacaggttggtggcaccatgcccagctactttttctatttttcatagagatggggtttcttcatgttggccaggctggtcttgaactcttgatctcaagcgattcacccaccttggcctcccaaattgctggaattacaggtgtgagccactgcacccatttaattatatatatattatatatatgtaatataatatatatattatatatatgtaatataatatatatattatatatatgtaatataatatatatgtaatataatatatatattatatatatgtaatataatatatatattatatatatgtaatataatatatatattatatatatgtaatataatatatatattatatatgtaatataatatataatatatgtaatataatatatattatatatgtaatataatatatattatatatgtaatataatatatattatatatgtaatataatatattatatatatattatatttatatatatatatatatattttttttttcgagatgatttcaatctgtcccccaggctggagtgcagtgcagcctccacctcctaggtttaagtgattctcctgcctcagtcttctgagtagctgggactacaggcagacaccaccactccttgctaattttttgtatttttggtaaagacagtttcaccctgttagccaggctgctcttgaactcctgacctcaagtgatctgcccactttggcctctcaaagcactgggattacaggcatgagtcaccatgccaagctaaaaatatatttttccagttgacagataaaatgtgtattctgcaatacaatatttttaagtacatatacattgtcacatgcttaattctaggtaattaatgctttacctcatgtagttaacatttttgttgtgagaccacatagcattgtcttaacatttttcaaaactagaaatacattataatgaactatagtcactgtgctgtaaaataaatcttctggacttattcctcctattcaagtataattatatattttctttccaactccccatttcttctaaacacgttggcatctggtattcaccattttattctctacagcaatgagattgttttttagaattcttgtgtaagtgaggctgggcattgtgtctcacgcttgtaatcccagcacactgggaagccgaggcaggtgaatcacttgaggacaggagtttgacaccagcctggccaaagtggtgaaaccctgtctctactaaaaatacaaaaaaattagccaggcatggtggtgggcgcctataatcccagctacttgggaggctgaggcaggagaattgcttgaacccagcaggtggaggttgcagtgagctgagatcacaccattgcaatccagcctgggaaacgagcaaaactctgtcttaaaaaaaaaaaagaattaatctgtaagtgatatcataagatagtattcattctgtgcctggcttatttaatataatgttctccaggttaatccatgtcactgaaagtaatagaattttcttttttaaaagatgaatagtattcaattgtgtatgcctaccacattatttttatttactcattagatgtcaaactgttgactctattttggctattgtgaggagtgctacaaacaacatagaagtgcaaatgtttcttcatcctgattttatttgttgtggatatatgtccagtattgaaattcttgtattatatgatagttttgatcttattttttttgtgagatctcttttgtttttcataatggctgtcctcatttacatgaaaaccaacagtgtgcaagcatccccttttcttcacttctatgccaacactttatttttatttttatttttttgagacggagtctcgcacttgttgcccaggctggagtgcaatggcacaatcttggctcaccgcaagctctgcctcccaggttcaagtgattgtcctgcctcagcctcccgagtagctgggattacaggcatgtgccaccacgcctggctaattttgtatttttagtagagacagggtttctccatgttggtcaggctggtcttgaactcctgaccttaggtgatccacccgcctcggcctcccaaagtgttgggactacaggcatgagccactgtgcttggtcacttttatttttaataaaaatcattttaacagtagtgagctgataccttgtagtttttttttttttttggcatgcctttctctgataacaattgacattgagcattttttaatatatttgttggacatgtatatgtcttgaaatatatttaaggtttttgctcatttttagtagttatttgttttcgttgtatagttatttgaggttttttttttttttttttttttttttttttttttttgagacagcgtttctctctgtatcctaggctggagtgcagtgatgcgatcatggctcactgcaccctggacctcccaggttcaagtgatcctcacacctcagcctcttaaatagctgggactacatgcatacaccaccagcctggctaattttttttattactttttgtagagacaggggtctcactgtgctgcccaggctggccttgaactcctgggctcaagcagttctcccaccagggccttccaaagtgctgggattacaggtgtgagtcactgtgcccagccgagaatgcttttttttttttttttttttgagacggagtcttgctctctcgcccaggctggagtgcagtggcgcgatcttggctcagtgcaagctcctcctcccgggttcacgccattctcctgcctcagcctcccgcgtagctgggactacaggcgcccgccaccacgcccggctaattttttatatttttagtagagacggggtttcaccgtgttagccaggatggtctcgatctcctgacctcgtgatccacccgcctcggcctcccaaactgctgggattacaggcgtgagccaccgcacccggcccccctttttttttttttttttgagttggagtcttgctctgttgccaggctggagtgcagtggcgcgatctcggcttactgcaacctctgacaccctagttcaagcgattctcctgcctcagcctcccaagtagctgggattacaggcacgcaccaccatgcccagctaatttttgtatatttagtagagacggtttcgccatgtcctcggcctcggcctcagcctctcaaagtgctgggattataggcatgagccactgtgcccggtcttgagtttcttatatattttttatattaagctcttgtcgtgtatgatttgcaaatattttgtctgttttttagttgtttcattctgttttaccagattctgtgcagcagctttttaattaaaagtaatctgagtaatcaatttttcctttggttatctgggattttgatgttaaataaaaaaattcactgcccaaatcaatgttattatgctttcactctatattttttgtactaattttagagtttcaggccttacatttaagaacctaatttattttgagttgatttttatatatggtgtgagattagggtctcattgctctgtatgtgggtgtaaagtttccttaaccatttattgaaaatactgttctttccctaagaaattgtcacccttacatttgtgtaaaatgtgtttcgtttcttcctttaatgttctttagattataatgtacaggtctttcaactttttggttaaatgtatttcaaagtatagttactagattatttgtagatgggattgtttttaaatttcattttgatatatttattactgtatagaaatgctactgaattttagatattgcttttgtattctgtgagtttaatgaatttgtttattataatagcttttggtaaagtcttaggcttttctatacttaagattatgtatagaaataaaaggttattaaacagggataatttaacttactttttccaatttggatgcctttggttttattcccttctctgttatatttagtaagactaaaaaaagtgcacattcttgccttgttctagctcttagaataaaatcttaaactttttttgtttatttagtatgttgttagctgtgcatttttttgttacatatagcatttatcagcttgaggtgcaatgctgctatacctaattttttcagagatgtattatgagggactgttgaattttgtcaaacttttattctgcatctgttagtagagttgtgaaatcacaactaattctacataaataccaaacattctcagagacttgtacgaacatctctgtgcattcaaagtacaaaatttagagaaaatagataaactgaatacatacaacttccaagtttgaatcaggaataaacagaagtcttgagagcaaaaatgcataaaattgtataatgaattagtaattaaaagaaaccctaccaaccacaaaaagccctggatcagatgaatctgcagaaaattttaccacgtatgcaaagatgagctggtcctaatcatactgattgtattccaaaaaaaatcatggtgggattccaccctaacttattacataaaattagtatcatgttgctctcaaaatctagtgaagacagaacaacaaaaacaactacaggcctatattcctggtgaacatagaaacaaaaatcctccatgaaatactaggaagctgagttcataagcaaataaagttactttgccacagtcatatgagctttattctatgaatgcaataatgtttcataatatgcaagtcaataagtgtaattcaccatgtgaaggtaattttaagcaaaaaagtatatatcacaatatatgcagaaatagcattcaagaaaattaaatattgactgatgaacatattcgcaaaaaaccaggcattcaagaaacatacctcaaaataataagaggcatctatgacaaatcctcagccaacatcataccgaacaggaaaaagctggacgcattctctctaaaaataaaaataatacaagaatattcactctaaaccgtcctattcaacatgattctggaagtcctagcaagagcaattcaaaaaagaaagaaaaggaatccaaattttctgcactgatgatataattctttttctagaacctttaagattagaccagaagacccctctgcctaataaaagactaaagcaaagtcttaggatacaaaattaatatacagaaatgagtagcatttctgtacaccagtaacattcaagctgagaaaaaaaaatcaagaagagttccatttacagtagccacaaagaaaaaacaatatacatagaaatgcattaaagaagtaaaatatctctacaaggagaacgtaaaacactgctgaaaaaaacagagacaaagcaaataaatggaaaagcatttcatgctcatgaatttgaagaatcaacacttaaaatgttcatgctgcataaagcaagctacagattaagtcctttttctatcaaactatcaatgactttttttaaatagaattaagaaaagaaggctgcatgcagtggctcacgcctgtaatcccagcactttgggaggctgaggttggcggatcacttgaggtaggaatttgagaccagcctggccaacatggtgaaaccctatctctaagagttacaaaaaaaaaaaaaaaaaaaaaaaagacaggtatggtggtgcatgcctgtaatcctagctactcgggaggctgatgggaggattacttgaacccgggagacagaggttgcaataagctgagaatgccactgcacactccagactggatgacagagtgagactccttctaaaaaaaaaaattaaaatatatatggaagaataaaagaattcaaatagtcaaagcaactttagataaaaaggacaaacctggagaccttacattacttatctttaaactgtactataagctacagtaatcagtataacatggttctggtacaaaaatatacatatagagcaatggaaaaaaatgagagagccctgaaataaagctacactactccaacttattattgaaaaagtgtacagaaataaaggaaaaataacttcctatgcaataaatggtagtgggaaaactggctagtcatatgcagaagaaaattgaatccctacctcatatcataagaaatataacaagatagattaataactgtgagtcttcaagctacaaaaatcctagaagaacatctagaaagtacatttctagacactggcctctagaaataatttatgactaacaccttaaaagtgaatgcaacaaaaataaaaattttaaaatggcacctaagtaaactaaggagcttttgcacagtaaaaagctatcaacaaagtaaacatagagcctacagtgtggaataaattatttgtatactgcataccacaaaggattaatacatggaatctataagatttaataagaaagtagacaagtgatgtaaatacttctcaaaggaagacataaaagctgccaataaacatgcagaaaattgcacaagatctctaatcagagagacggaaaattttggagagaagaaaatctttataaactgttggtgaaaatgcaaattcagcccctgtgaaagtttctacatttttcaaataactaaagatagaattgccatttgacccattaaccccttttttgggtatctacccgaaggaaaatattttactaaaatgacacctgtacttacatgttgattgcagcactatttacagtggcaaaaaccttgaaaaactatagggtatgatgtacactatgtgggcaatggaattattaaatgtgcaagcctcaacatcctgatgtatacaggttacaaatctgcacatgtaccacttgaatctaagataaaaataataaaatgttttgtggtataatggcatgttacatttctccagttctgaattagtagttggaattaggggtgagagaattatttgccccttagggcataagggtaaatgtttttataccaggtctccccacactctataagctagcctctctgaaagctcttgggctatatagctcaagaagtgttttattcccaagtatgcagataaaataaaagaccctacatctttattttttatgtatcaactgtacattagactatagagttaatttgttagtctactcttttgggggaaaaatggtaagtggtttaatcacattaaaaatttttttagaaaatgtgaggttgtgaaaatcatggttaattccttaattaggaaaataaaacatttttctaaaaaaatgcataaaagtctaatgtccatagcctaagaacaatgaaacagagactgtggtttatttaagaccacactgctgcaaatgcttattccatcacaagaaatagaaacaatgggtcagaaggtgttttcagagtacttttcttaatctattgcagtgtttaaagtttggtctttattatctcctatataagtctgtacttaaaaagccatgaattttatgttaatatgctcacacaaatatttttcctagaaaagtactagtgtgtttgcaatgaatgtgtagcatttctggcctaccttgtgctgctgtgtttgtgtgaaattagaagacaggaaataaagcagagttgaccatgacatttctagtttctacaaccacaccatctgaaatgtagtgttatgtcaacaataaataatgacagtatttcaaaatatagaaacaaattgatactttatatatttagttttttatagtttataaaaatttgtagtttctgaattattataaattaaacaacttgaacatgaagatacctaaaagttttatctaaatgatagtattaaaattgtaatagcttatgattgtgagtcacaattgccctattgggtttactggaaagtagttatttatcttctaatagtagatagagaataggtttttataatcctaaggatacagattttttttttgagacaaagtttcattcttgttacccaagttggagtgcaatgaaacaaatcttggctcactgcaacctctacctggcagcttcaagcgattctcctacctcagcctcccaagcagctgggattacaggcatgtgccaccacacccagataatttttgtatttttactagagacagggtttcaccatgttggccaggctggtctcaaactcctgacctcaggtgatctgcccaccttggcctcccaaagtgctgggatgacaggtgtgagccaccgtgcccagcccagatcttttaaaattagtactgcttagatttgtacaaaattcataggcttgcagtagcagaaattttaatatttttttctaatagaagagaaaaagtggctgggcatgatggctcacacctgtaattccagcactttgggaggccgaggcaggtggatcccctgaggtcaggagttcgagaccagcctgactaacatggtgaaaccctgtctctactaacaatacaaaaattagccggatgtagtggcgggtgcctgtaatcccagctacttaggaggctgaggcaggagaatcgctggaacccaggaggcggaggttgcagtgagccgagattgtgccattgcactccagcctgggtgaaagagcaagactcagtctcaaaaaagaaaaagaaacaaaaaatcaataaaattaattttttaaaataagtttaaaagaaacttcatatttgttcatttttttttttttttattgatcattcttgggtgtttctcgcagagagggatttggcagggtcataggacaatagtggagggaaggtcagcagacaaacaagtgaacaaaggtctctggttttcctaggcagagtgtttgtgtccctgggtacttgagattagggagtggtgatgactctcaagaagcatgctgccttcaagcatctgtttaacaaagcacatcttgcaccgcccttaatccatttaaccctgagtggacacagcacatgtttcagagagcacagggttgggggtaaggtcatagatcaacaggatctcaaggcagaagaatttttcttagtacagaacaaaatgaaaagtctcccacgtctactactttctacacagacacagcaaccatccgatttctcaatcttttccccaccttgcccccttttctattccacaaaaccgccattgtcatcatggcccgttctcaatgagctgttgggtacacctcccagacggggtggtggccgggcagaggggctcctcactgcccagtaggggcagccgggcagaggcgccgcccctcacctcccggacggggcggctggccgggcggggggctgacctccccacctccctcccggatggggcggctggccgggcggggggctgaccccccacctccctcccgggggcagctggcctggcaggggctgacccccccacctccctcccaggcggggtggctgccgggcggagacgctcctcacttcccagatggggtggcagccaggcagaggggatcctcacttctcagatggggcagttgccgggcggaggggctcctcacttctcagacggggcggccgggcagagacgatcctcacctcccagatggggtcacggccgggccgaggcgctcctcacatcccagacggggcggcggggcagaggcgctccccacatctcagacgatgggcggccgggcagagacgctcctcactttccagatgggatggcggccgggcagagacgctcctcactttccagactgggcagccaggcagaggggctcctcacatcccagacgatgggcggccaggcagagacgctcctcacttcccagacggggtggcggccgggcagaggctgcaatctccgcactttggggggccaaggcaggcagctgggaggtggaggttgtagccagccgagatcacgccactgcactccagcctgggcaccattgagcactgagttaacgagactccatctgcaatcccggcacctcgggaggccgaggctggcggatcactcgcggttaggagctggagaccagcccggccaacacagcgaaaccccgtctccaccaaaaaaatacgaaaaccagtcaggcgtggcagcgcgcgcctgcaatcgcaggcactgggcaggctgaggcaggagaatcaggcagggaggttgcagtgagccgagatggcagcagcacagtccagctttggctcggcatgagagggagaccgtggaaaggggagaagaggagagaggagagaggggagagaggggacaggggacaggggagaggggagaggggagaggggagaaggccacatttgttcattaaataagatttaaaaccacattttaagtgactgatcagtaattccaatctatttcattttagtcactgaaaaaaccctaatatcctttaattattcaaaaaatattcaaaaaaagtattcttatatttgtgtttctgaaactttcagaaactgtggaccacttaatggatgatgacgtacatggagacaacaaattttctatatgataataggctcatcctagcttttatttttatttttttaaaaattttttgagacagagttttgcttttattgcccaggctggagtgcaatggcgcgatcttggctcactgcaaactccacctcccgggtacaggcaattcttctgcctcagcctcctgagtagctgggattacaggcatgtgccaccatgcctggctaatttgtatttttagtagagatgaggtttctccatgttggtcaggctggtcttgaactcccgaccttaggtgatctgctcaccttggcctcccaatgtgttgggattacaggcgtgggccacctcacctggcctcatcctagcttttaatttaaaaattcaaattatttcaaaagtaaaattaatggcttttttaagtcatgagagggatagatatcattgttagaatccatttaccaaagtgtctatcttaggcttcgtaatgagtactttaaaccaaaaatcaagttctacatactatctaagtgtaaaaagaagtggtttgtaaattcctctttatttctactaagttagaaaattcaaagccaaaatgttaagttaggaataaaaacaagcattggataagagtgtgttgggtataatgattaagagtcaaactcgacatcaagtggttcctgattgcatctcagttctgctatttatgggctgtacgacctgaatgcagtttcttcaccgctatgtgcttgattcttcagctgtacagtgagaataatggtgcctaaatcctaaggttttgttaaaattagagcaagtgatacaaataatgtcccagaagagcatccaacgtatagcaagtgtacagaaattttagctcttatttgtcaattctgttagattgtgatcaatgttaagcctaaaaaccaggtgaccacatcagtggactgtaacttatgttcattctactcagtcagtctgaggctatatagtagtcgaatgtttctaatactatccttggcaaattcttatatattcacatatgtgtgtgtatgtgtttcctgaaaattttaagatgaacaagcactttcttctctggccgaatttcttaaagcttttttctctctttggttttaaaaaagtgttaatatttttggttggcaaatcagagttgtatacatttatggggaacaatatgaagttttatatatgtatataatatggaatcaaaaagtcaagttaaataacatatcaactcaactatcatttttgtgatgagatatttgaaatttagtcattttgaaatatacaatacattatagtttactatagtcacactgctgtacaatagatctcaaaagctatttaacctgtctatttgaaactttgtgccctttgatcaactccctctttccttccttcctttctttctctttctttctttcttttcttttcttctttccttctttcttttttattcctttcttttctttttttttttttttgagatggattcttgctctgttgcccaggctggagtgcattggtgcaatctcagctcactgcaacctccctcttccatattcaactgattatcctgccccagcctcccagatagctgggattataagcatgcaccaccaagcctggccaacgactccctattttcttcccaccacaccactggaacaactggtaaccgttgttccactttctacttttgtgagttaaaatttattagattctacatataaatgaggtcatgcagtattattctttctgtatcaggtttcttccatctagcataatgtcttctgaatttatctatatgtttttgaagaataggattttcctctttttttttttttttttttgagtcaaagtttcactttgtcacccaggctggagtgcagtggcatggtcttggctcactgcaacctccgcctcctgggttcaaacaattcccctgccttggcgtcccaagtagctgggatttacaggtgcccaccaccatgcccggctaattttttgtattttttgtagagacggcgtttcaccatgttggccgggctggtcttaaactcctgacctcatgatccgcctgcctcggcctcccgaagtgctagaattacaggcatgagccaccacacctggccaggattttcctatctttaaggctggatagtattccattgtgtatccatgtcaaattttttaaaaaattaatttaaatatatatttattattggttgaaaaacttgtgttatgaaaggatatttctgtgttaagcatgtattaatgtaattcagcactaaatattaataatagctggtttgtactgagcactaaccataacactatatccatattaatgagttaaattctcccagtaacttaataccacaggtattataattattctcattttacagaggaaccaaaagagccactgagaaaaacaacttgctgacaatagcccaggctggagtttagtggtttgatcttgggtcactgcaacctctacctcccgggttcaaactattctcatgcctcagcctcccaaatatctggtattacagacgtggaacaccatgcctggctaatttttgtatttttagtagaaatggagtttttacatttttgccaggctggtcacaaactcctgactttatgtgatcctcccaccttggcctcccaaattgctgagattacaggcgcgagccaccatgcccagcctaatatgaatgtttcttgaatccagaaaagttatgcaggtagtttcttgtaggttaacataaaagaacaattagcaaaaacatatgaaatggggtaaaattaatcaaaaccacatctttccaataagcggtaataattgctgtgcttttttaaatggctagattactaacaatatgcaaacacaagactttggctttgctcaattattaagtttttgaacattttgatatctgaaatcttggctaaagttctttttttttttttttttttttttttgagatggagtttcgctcttgttgcccaggctggagtacaatggtgcgatcttggctcaccgcaacctctgcctcctgggttcaagcgattctcctgcctcagcctcctgagtagctgggattacaagcatgtgccactatgcctggctaattttttgtatttttagtagagatggagtttctccatgttggtcaggcttgtctcgaactctcaacctcaggtgatccgcccgcctcggcctcccaaactgctgggattacaggcgtgagccactgcgcctggccaaagattttaaaaagaatatttttgaggtggctttttagggtttccatggtaatacaagaagaattttaataggcaggaaaatgcattctacatacacacattgcacttctctgatttgctttaacattgaaagattaaagattgcaaatctagtttctcagtttagagtaaattaacaaaagatttatttttcagctggcaaataattgtataaaactaatggataatagatgccattagctgtcaaaaaatagcatgactagattcagtaagtatctagccatgcaaatgacaatccaataaaattaaaaccctaattggttcatgtggaaagcattgatgtgcagtgtcgtgcacctccactcagcacctccttgggcctgtttacagagataccaatttctccttcgtgactaagggtgaatactggaaacagagtgctgtgttcagagttattactgggaacatggttaacacatttctttcatattataaagacattttatgaatgttactctgcatcacaaaaccttttagtaaaagattgtttatttaagtacttaatttggatttataaaaaatgtcaatattctgggtaagtcacaaacacttaaatctcaatcaaattttataaaacatatttgaataagataaagttttcttagacaagaattgtattttattactaaatttagagacaaatagaaaaccagtactttgggccaaataacagtgtttggcacagaagtactcccaaacaagtgctctccatcatcaccgttaaagtagcaatggcaccacgtgctttcctgaaaccagctggactgttttccactgataaaaagtggagaggacattgaaataatgaaggaagctgatataaatggaatacttatataaaataaaagtaaatacaagtgaaatacttatatgaaatacttttaaaataaaaagtagcatttgatgtttatgactgtagatgaaactgttagtatgagatcctcatatttttacttctcttgacaggataacttgattcacaatgttcttatttcaaataatattttttctgctagatatttgcaagctttcagtcacatagtacctgagctcaacagaaatcaacaaaagaaatattttaccacaagcattttattattgatgcacatgcttattttacttaaaatacattagcttttggtgaaagattatacttttttttcagtgtgttttttattgtccttccaggaaactgctattctcagctctacctgcattgactaatagtgagtaaaagttatgtttgggtaagaagcaaatgtgtcttgtctgcatctcttttttcatttgttggctgaagaaagtataatgcagatagaagattaaagaaaataaaatccctgaaagattatttagaagtcctcttaaccggaaaaaaaaaaagccctcaaggaattgtgatataagtagaaaatatattatcttgctaagcctctaaaatttcagcataaaaggccaggcgcagtggctcacacctgtaatcctagcactttgggaggctgaggtgggtgaatcacgaggtcaggagatcaagaccatcctggctaacacggtgaaaccccgtctctactaaaaatataaaaagttagtcaggtgtggtggcgggcgcctgtagtcccagctactcgggaggctgaggcaagagaatggcgtgaacctgggaggcagaggttgcagtgagcagagatctctccactgcactccagcctgggtgacacagcaagactccgtctcaaaaaaaaaaaaatttcagtgtaaaacctgtattgctttaacaaatatattattccttcagtttttatttttcagaatatgattcaatttcttggtgaatcaaaactgagaggagaataacttatttgttaaggtaaaaaatgtagggaatactcactgcttatggccaacatcttctccacccccaggcccaggcaatcatcattctatgctctgctgttattgatacaggagcacaaaagaaattatttaggcaaattgtgaggataagagagcccttggcaaagcttcccttttaacaagaagcagcccccaactgactttttttcaacaaagagtagcctgtaaaatccagctgcaaatatagataagcaagctagaagcttgcatgggtgaatgtcagcagctgtgccaatgggaaaaggctacctgaggccaagcattttcaacatggaggcaccatattcccttttttgtgaatcacgtgtataaaggaacaggaaacatggcactggccaggtaaaacacccatctgtatagtagaaaattaaagtggggtggccagcttcttcatgcactatgtaaatggtacaccttgtctgaccaatcttttgggccctatgtatatgaaacatcacctcctcaagctcatctgtaaaactccatgcatttcaccacagaactggaagacctgctcgagagcccctctctctctgaaggagacagaggttttatttttcttttgcctattaaacctctgctcttaaactcactcctcatgtgtttgcattcttaattttattgctgtgaggcaatgaacctcaggtattaccccaggtgaatgacactgcttcattgtgggggcttgtccaggattataggaagggtaagtataaaagcaaatgctggccaggtgcactggctcacacctgtaatttcagcactttaggaggccgaggtgggcggatctcctgaggtcaggagtttgagactagcctggccaacatggtgaaaccctgtctctactaaaaatactaaatagccaagcgtggtggtgcatgcctgtaatcctagctacctaggaggctgaggcaggagaattgcttgaacccaggaggcggaggttgcagtgagccaagatcacaccattgcactccagcctgggcgacagagcaagactctatctaaaagcaaaacaaaacacaacaaaaaaaaaacaaaaaaaaccagaccccaactctgtccttttattttgaggctctcacactccattttaaaatcaaataaaaccagaaataccaggtgtcctatggccagctgtacctttagggtgagctgccattctcaagtctcacatgacagacttgctggggagaacataatgaattccccagtgccctcaggttgctgcgaatgttggctatttttcaaactgcttttcatttatggaggacctagccatcacatggggctggaagaggtcctaaagtaattgaggatttcttttctgggccacaccctggttttacctgaaggcgtctggaccgatcccagcctctgactgctcgactggatgttggcaacaggatttccaagctttccctatcacaatttttctccctttcctatctgtgaccaccatgtcttctagcctcttttcgtacgtaatgccgcaggaatttttacagttcaaggaagtaatcctgttaggcaagatcagaaaataccaatagtaactggaaatatagctcacagggttgctggttttgtgaattttttaggagcagagcgtcccaccacagtcaaaaccactgtctttctctccaccttgggccacttcaagggaaaggaaggagactaaaagggtgcctttctctcacttttctttctaggtgggtaacaagccatctttggtctgcactcctcttgagtgcattcagaagcattggcactcctgtaaccccatgagtttggggaaaaaaaaagtggcttattgcacaagggcctgacatttttactagacctttgcaagcactgcaaaatcaacccagctattagcagtcatatcaagcaggtctataggaatgattctccaaaattagagaagcaacttccaggagaaccatctgagggatcccccttattcaggatccactcaagttcccatgtcatgacagaaccttagtcaaaaaagaaaatagtgaatgaaaaaataggagaaacattattctcaattgaaagagagacagtacctcttgagaatcctgattggaaccccaatgatgccacagataaatggaaaatcaaacactttttaatgtgcgtattgaagggcctatggagaactaaggccaatcctcttagttactctaaactgtccatgatagaccagaagctagataagaatcctgcagcctttatgaaaaggctgagagaggctctaataaaacacacctccttatcccctgattcagttaagggacagctaatcctaaagaacaagtttattacaccggcacctcctgatattagaagaaaactgcagaagcaggatataggagcagacagcaccttggagaacctcctgagggtggccaacttagtcttttataatagagaccagaaggaggccccctaaaaagaaagagagcacaaaagaaggacaaacctttagtagctgctttgcatgcttgcaaagtccaggatcccgaaggtgccttcactaattgctacccacgtggcaagccagggcactttgagaaggggtgcccaggcaccaagaggaatccacctcaaccctgtcgagcctgtggcatggtccactggaatcaaactgcccccagaggtggaggtcatcagcttcagaaccagtctcacagatggtccagaaggacttatgggtcctggggctcaaactcctggctccagtggctcaaactgccattacagcacaggatccccaggtgattctgaaaattgaaagaaggaaggtagacctccttcaggaaactggagtcagcctctctcttcttctctctattcttctacccttttcccatagcatgactatgagagacatctcaggaaaaactctaatccaatatttttctcaaccctttagttgcagttaaaaggacctattatttacacatggcttttaaatcatgcctgaaagttacactcctttattaggtagagacattctatctcacatggggaccagcatccttataggcccaggacaaattctttgtctctatctggtagaagataatattaatccagaagtgtgggcaattcaaaggagaataggtcaagctgtaaacatgaggccagtctggatccaacttaaggattccactttctttttttctttttatttctttttttttgatagagttttcactcttgttgcccaggctggagtgcaatggtgcgatctgggctcactgcaacctccgcctctggggttcaagcaattctcctgcctcagcctcccacccaagtagctgggattataggcaggcactgccatgcttgtgtaattttttttttttttttttttttaagtagagacagggtttcaccatgttggccaggctggtttcaaactcctgacctcaagtgatctgctcacctcagtcttccaaagtgctgggattacaggtgtaagccacctcgactggtggattccactttcttttctaatcagaaaaaatatctcctaaagccaaaggataaaaaagggctagaagccattattagtaacctaaaaatctaggccctcctcaaaccctgtaacaccccaatattaggagtgcaaaaatccaatgtgaaatgaaaaacatcaaaaaattaacaggttattatcctcagttttccttccacaaaacatagcagaaatgcactctaaggaatataaaaagaaaacaggaagtagccgaaggaaatagtttagctgatcaggcagttaaatcgcagaaaggaagcttcagggcatcaatacacttcatacccctctaatttggtaaggctctaaaagaaatttggaggcctaatttggttaggcctcagtactctcctgcagagataaaatgggtcattactcaagggtacactttccagccctcagaatagctacagtcaaaggatggcaaactccacttgccagcctccagccaatggaaagtccttaaaaagcttcaccaagcttttcacttgggaaaggataaaacttttcaatatgcccagagattgttttcaggagagaacttattcaaaacagtcaaacaggttgttaaggcttatgaagtctaccttaaagataatctcctcaacaagacagcttcttcctctttgaacccaaagggtgggaagctatgcaagggagatctggcagacaaacttcacccacatgtcaaaaccaaagggcatccaacgccttctggtatgggtggatactttaagggtctttcttttcatgggctatgtaattggcacacttagtcaaaccaatcccctgtaaatcaatcatcacctatgtaaatcaatcactgcctcctcaagccactgtaaaaaatcaatcatgttctgctgcaaatcaaagaccctctcttgggcaacgcacattctcagaatgaggaagcttttcttctctctcttctttctattaaactttctgcttctaaacccactgcttgtgtgtgtttgtgtcccgaattctttttcagtgcaagacaaagaaccatgggtagatgcccagacaacaaagacatttcatttgggggttctcatctgggatcaggatcagaacagaagatagaaacatcagattggtgagtatggagtgaacctcaaatctgtcttttaatctcaaggcttccttcaaaccagttttattcgcagaggtcctaaccatcatgtgaggctgggagaagtctgatgcaactgaggattactgtccagggcacaccgtggcattattcaaaggcttctggactgaacccagcctctgacagcctgtctgagtgttggtaaaggatcttcagctatcctgtcataaaattttcctttctttctatctggtgtcactatgtgtcctattctctctgtgtgtgcaatgtgcaggaagttttacagttcagagaaacacttctgttaggaaagattggcaaacgcctcaggcagtaactcaataagcatctctaacgttcctctagtgagcacatggtatttctaagccaacagtgccacctagtgaaaaatagaaattctcttcgtgagacacattgtcagtcctttaccataacactgcagtttcctattttttgtgctgctagaaaagccccttctgtgaatgggagagctctgccttcaacaattaggagtaaaacattctccatagccaaattttagttctgatactgtcccattagcaggaaaaatcatcgttaggtccctaccttcatttaaggcacctagtctgtctccaattagaacagtacttaattagtaaggagaattttaagtttataagttaagcagaaacacttttctaagggtgaatgttttatcatgagccataatagcaggcaatctagcaattttttttgttaaagaaaccttgcccaaaggccgactattacagtctctgtgaagattcattttttggggagccaggaagatcacacaagtttagaaagtaaaaggggatcacaggtggataagctagggttgcattgctaaagtatggttaatcccatcacttagttcatctggttccatggtttggaaagacacacctacaaccatgggcagcacatttaacacgatgctgggacccaggaaacaagaaaagagaatggttggggagacactcacactgtcttcccctccaacctgggtcacaatgaaagcaggaaaactaaaacgatgtttttatcctcactttttctagatgagcaacagaccatcttcagcttgcacccctctggagtgcactgtgaaacactagaacttctttaacctcaggactttgaagagaaaagcaattcattttcttttgcactagggcatggcatttttactgaacctttgcaagccttgtaaaatcaaccccgctattttaacaggcatatcaggcaggactatagagaacaatcctccagaattagaaaagcaacttccaggggaaccatctgagaactccccttatttggggccacctcaagttctcttcttattacgagaccctagggaagtaaaggaagacttaggccaattttctgacaactccaatacgtttatagaaggttttcagaatttaactcaagtgtatcacctcacatgaaaggatgttatgctgcttctaaaccaaaccccaaccacagctgaaaagcaggcagttctgcaggcagcagagattttcagaaatgagcaacaaatctcctataatacatcaaaagggaagaaaggagatagggaatgtgaagaaatagcagaaacaccatttcaaataggaagtgaagcagttcctcttgacaaccctgactggaactccagtagctctgcgggtgaatggaaaaggagacactttttaatatgcattttagaaggtctggaaagaactaaggccaaatttcttaattgttctaaactgtctatggtagaccaaaagccagatgagaatcctgcagcatttatggaaaggctgagagaggcactaatagagcaaacctccttatccccagattcggtcgagaaacagctcattctaaaggacaagtttgttacacagtcagcttccaatattagaagaaaactacagaagcaagctataggaccaattagcaccttaaagaacctcctgaaggtggccactttggtcttttataatagaaaccaagaggaggaccctgtagtcccagctactcaggaggctgagacaggagaatctcttgaacctgggaggcggaggttgcagtgagctgagattgcaccactgcactccagcctgggccacagagcgagattccatctcaaaaaaaaaaaaatttgtgaattcaatttttttggtattcttggtatgtttttgtggtgattcttgatgcagaagtttataatgtgagtatctacatgctattctgtctatcaaagtgggagctgcaagttagtcttgccttctagtcaccactttccgtctctctcaaaggtggtcttttaacttagctactgtttcttagctataatttctgagttcgaggtggagcccattaagaaatattctatatgcctggactcagtatggataaatctttaaaagggcaagcctactttacctaagcgtctacttctacaaataacttatttaagatatatatatatatatatatttttttttaccttcaaggtgggataatgactaagaaaaaggttggcagattgatttaatttttagtaagcatttagtcttttatttaccttttacgaagattatcttttaaaaaacaataaatatattaaaaatatattaaaaatattaaaatctttttagaagctgctgcacatcagcagtcaagcctagatgaggctaactagggagacttccttttcaaatgcatgtgctaaagtgcagtgttgtttatttggaataccccattgtaattttaaattatctttagtaaaattttcccatttctgtgtttgctgctacaagggcctaatacatatgcatgtaaatgtaggcatacctggaagataaattactcagttcttaaaaaattaagcgttccattcttatcttgaaactttctttggctgatatcattctgataaacttagccaatgattcttttctgcctaaaaaaacacaagaataagaaaccaaggggataaaacacaacaatatctgccaatttacagatgtcaaagtttacactccttgcattattgccatttactaccgatttctacctgacccagcgagatgtcatagacctctaactgaatccaagccagttaattatcagatccaacctgatcctggatccagtccagtttctgtcctgtcttcttaatccaatttgaattctaaattcgctaaaactcagagagttcaaaacacaaatccatgacactttggaatccaagaaagaacttaccatgccccctagttgctgcaagacagcaacgaacacaataagccattgtttggtcacttggtgttcctgggggttgctagaggctacttcagattttgcttctagttcaatctgttaaaaaagccttaaacagaatatatatatatatttgagatggagtttcattcttgtcctccaggctgtagtgcaatgatgcattcttggctcactgcaaccttcgcttctcgggttcaagcaattctcctacctcagtctcccaagtagctgggattacaggcacccaccaccacgcctggctatttgtgtgtgtttgtgtatttttagtagacacagggtttcaccatgttggccaggctggtctcgaactgttgacctcaggtgatccacccgccttggcctcccaaagtgctgtgattacaggcgtgagctaccgtgcccagccaaacaaaataaatttaacagagtttaatcaagcaaaaaattattcactaatttgcagtctggtgagccagagtaggctcagagaaattcccaagcagtcacactgttggaggcatttaaactagaacaatttcactatgaataggggatggataaaataacgctgagacctgttgggctgcattcagaaaaagttaggcattcttagtcgtaggatgagataggagttcaataggattggtatcacaaaatacaggttataaagacccaattgataaaacagaatgcaataaaaaagccagacaaaatccataaaattcaagatggtaatgaaagtgacctgtggtcatcctccttgctgattatacattgattgtaatgcattagcatgttagaagaaactcccactggtgccatgatagtttacaaatgccatggaaatgtccagaagttaaactacatagtctaaaagggggaagaactgtcagttctggaaattgctcactccagtcatggaaaattcataaatatttcaccccttgtttagcatataatcaataaataactataagtatactcaatcaagcagcccatgccatttttctatctataggtagccattcttttacttcttcactttctcaataaacttgcttttactttatagactcaccctaaattctttttgtttgtttgtttgttttttagatggagtcttgctctgtcacccaggctggagtgcagtggcacgatctcggctcactacaacctctgcctcccgggttcaagtgattctcctgcctcagcctcctgagtcactgggactacaggcatgcaccaccatgcccagctaatttttgtattttttagtagagatggggtttctccatgttggccaggatagtctcaatctcttgaccttgtgatccacctgcctcaacctcccaaagtgctgggattaccggcgtgagccactgcgcctggctgactcaccctaaattattttatgtgtgagattcaagaaccctctcttgaggtttggattgtgatcctgttgcgggacgcagaggactagagagactagtatgggtgaataaaggaggatatttattttaaggtacgcactggctcagtggattcacatctaaaaagctgagacttgaacaaagacagagtggggtttttataagtgggcttacaaaagcaaaacaaaagcagttaatcatatagtgcataacctgtggccttgcatagctggtggccttgtagctgcatcaaaagaaaaacaagaactggctaaatacagacatttataaaacatagtcatgcttaagaggcaaaggaaaggagtaacaataaatgaatttgtctttttgtttttcttcaaccttgctctggagtgggggagtttctggagtctattccttggccttggctttttggatagcgttatcttataaccgtccttgaagtgagctgctaggcagaggaaaactagtttctttttctttttaacccttactacaatccctttctggtcacaaaataatggaagaatatttatacacagataaaaaacctgaagtacaggaaagaaaagtgagttacagaaagagctggattaattagagcttggcatttgctttatttagacatgaattagagagttggcctcttttgattggccaaaatttgataactgacacaaaactcagttacactttatttacactttcagttgggtttcagtttaccatctatgaagaaaccctcaggctcaattcaaaacacataaaaaggcagctttaggttaaactttatttaacaaaacagatttaatatgtctgcaaatgcttttcatctctttttgatatttggagactattcatgattttcaacactgactaaaactactgtgcctgaaacaaactctaaccttgatatcatgtgacttatagataaatctgctaaaaagatattttattctgctgaaatttagaaaaatagctgagtacatcttgaagttgtcttttgagttttaaaggagcagagctgctttttaatattctaaagtcagaagcagccatgaggcaattctcagcagcacacatgaaaatcacacacagtgaatgcatctttcactctgaaccaattgttttctccccagtctgcgtgtaaaaatcacctgggggaggcgctttaaaaatcttcccaattcaaattgatacaccccaattaaatcagaattcctggagtggaacctgggcaacagtgttgtttaaatatctcaaggtgacgacagagtacagccaagctcaaagccactgctttaaaccaacactttttagattacctacttgccaattaattctcaaataaataaaaaattgtttgccactaagtcacggtctttcagtcttaccagtattatcaaattacaacttttttcagaaccaaccttgctattggttctgttcgtgattcaacctggttccatcgatactgcacactatgtgcagggcactgtgctaggtgccctggccttggtgattattactgtgagaaaaacattttcttaaatttaaaaaagttgcatgtccccaaaacaaacattacatgtacccaaattaagaaaaaaataaaaatacctatgagtcgcccaaaggttagagcttttttttttttgagacggagtctcgctctgtcgcccaggctggagggcagtggcacgatctcggctcactgcaagctccacctcccgggttcacgccattctcctgcctcagcctcccgagtagctgggactacaggtgcccgccaccacgcctggctaatttttcatattttttagtagagatggggtttcaccgtgttagccaggatggtctcgatctcctgacctcgtgatccgcccgcctcggcctcccaaagtgctgggattacaggcttgagccaccgcacacggccggttagagctttaatactccctctgaatattaacatctgtatgattatgtcctgagtgagtgtgttccaccagaaaacaaataaacaaaaaacaaaatcctgccattattctgagatactcagttagcatttttgtacaaatatgtactatttaatttttttattaatatgtaacatgcatacagaaatacatgcacaaagcatttattcatgcaaaactcaataaattgttacaaaaaatacacttgtgtaataaaaaaataaaactaggcctggtgcagtgtgtcactcctgtaatctttgtattttggaaggccgaggcctgcagatcgcttgaactcaggagtttaagaccagcctgggcaccgtggtgacaccctgtctcttctaaaataaaataccaaaaaacaaccaggcatggttgtgcacacttatggtcctagctcctcgggaagctgaggtgggaggatcatttgaacctgaggggtgggggttgcagtgagccaagatcacacccctgcactttatcctgggtgaaagagtgagaccctgtctcaaaataaaataaaactagcctcatccatgccccaacaattgctttatcctttcttctccaacaatagccataatcagagctaacattatagattaattttgttattattatagaaaatttttaacatgtgcaaaacaaacaaaacacatattgttgaggcttgtcaatagacttgtcatgaagcctcaacaactaatcttgtgccattctggtgtcatccacccttctctacttcagtcagccctggtcaacccattggccaccctccattattttctttaggttttttttttttttttttttttggtgaggtcgagtgtacatacattgaaaggcacaaatcctaactgaaacattttgacagataaatacactcatataacctttatatcttttaagaatgaactgaatattgttctattctagtgatagagcataaaatggaatgatgaattatttttcattctcagataattccttcaggcctttctttcagacaattttgttgtcacaagaggctattttcttggtgatttttttttttaaccattggttcattttgcctgacatcatacaatatgtactattttattttaaacttgtctcatttagcaggtttatgggattcatccaggatgtttgcttcagtagtttgtttctttctatgactgttctcttgtgtgaatgagttacaagttttccatccatttcctagagatggacatttgggtttttttcctgctttaagctattatgactaaaaggtttataaacattatcgtacaaatactttttactatataattttattcctttattagcatagcatttaagtgacacctctttactttttttaatggtttctccgggtattacaatatgcatctttaacatatcacaatctacttaaatactgtactattttaataaatgtaaaatatgaaggccctgctgttaaaaagtttgaagtacctccttctattttttgtgctatttataaattttatgtctatgcattatatatgtcacaatactggtttatgacatttgttaaatagtcataagtcttataaagaaattaagagaaaatgatgttcataaatatttagaggcaaatattttgaggctatgtaaatacactgtttctcttttaaatttacccacaatttttgcattcttcagtacgtggtgtctacagtaattattattgtggtgtcctagttgtgattttctattttgcattatccatctacattaattagtacttggaattctataaaaaagattttcttcctatctctatttatttctatttattttttctagatctgtatggacttatgaatatttcttttattctcagctttataatccaatcctattattatttattttgtttctcatgttgttccagcttgggctgcttgaaagtctttcaggttgacttcctctgacatgtcttcttctgttgttcataaagcacttttttaactttctggcttcacaagatactctaccctaacttgaatgttccactccactgctagaattatctaattttatgaacagtcttgcttccttttattaaagaatagtgcttagaggccgggcgcggtggctcacgcctgtaatcccagcactttgggaggccgaggcaggcggatcacgaggtcaggagatcgagaccatcctggctaacacggtgaaaccccgtctctactaaaaatacaaaaaattagccgggcgtagtggtgggtgcctgtagtcccagctactcagaaggctgaggcagaatggcgtgaacccggaggcagagcttgcagtgagccaagatcgtgccactgcactccagcccgggtgacagagcgagactctgtctgaaaaaaaaaaaaattaaaaaaaaaaaaaagaatagtgcttagaaaccatgatatgagagctaggtgtgctcagtaatactgggatgtcactgcttctgaaacctctcagcaaacagagtttgaaaatttacatattaatatagattcatgtaggaacacctctcctttctctctctctctctctctctctgtctcaattgatatattatgagacatgcatttgtctaaatattcccaaatctggtccagcaccacagggtttgttctagaattctcccccgcttttttttttaacttcagaggaaagcaggcagtaatgaccttatgtatagtgtgtgtttacacacacacaaagacacatacacacacacactaacagaaagagtagttttaaaaattgctaatctttattcttataaacaaacagtactaaccagaatacagtgtttgtgttcagttcttcagtcttgcagtattcaattaaaacagtttttcattttattattattattattattattataatttaagttttagggtacatgtgcacaatgcgcaggttagttacatatgtatacatgtgccatgctggtgtgctgcacccattaacttgtcatttagcattaggtatatcccctaaaacactgtttttcaaagtgatatacatcaagacctttcattccaatcttctgaaatagtgttaggttagataatacatttttagtaaggctaaattctattttttactgcctgcattttatcagaatttcctcaaaatcacggtttcttttttaatttcctgaaaggaaaatttattctttgtgatgtacagttccacgaagtttgacaaccgtctagagtcatgtcctcgtctccacagtaccacacagaactctttattaccctcaaaatcatctaatgcttcccattcgtagttaacttctaccttcatctattctttggcaaccagtgattatggtttagttgctgtcttcctcctcctccccctcccccctcctcctcctcttcctcctcctcctcttccttccttccttctttctttgtctcctcctcctcctcctcctgtagggaggtcttgctatgtttccaggctggtctcaaaatcctgggctcaaacaatcctctcacctcagccccacaaagtgctgagattacagacttgagccatcaagactgcactgattatcaatgcctttaatttctttttctacaacgccataaaattgaatcatataatatgtagccttttggatcctcctttcttcacttaaagaaatgcatttctgactccttcatactgtgatgtgaatcaatagtttctttctgttgacaactgggattctattgtatggataacccacagtttgtttaatcattcacctgcagaaaagtatctggtttacatctagctttttgcaattacaaataaagtagacaataaacatccacaaaaaggttttcactttaacattagttttctctttgctttagtaatgacctaggagtggaatattttggtaacctaataagtgtatgtttaactttataataaaccactgaaccgtttttcaaagttattgcaggagtttatatttctagttctagttgctccaagtcctcgccaggtctaagtctttgtaatttttctctgcatggttgtcattctcatgattgtgtgctatttcattgtggcttatgctttatttttttccattaatattgggaagcccaaaatatataatcaatgtaggaagaaatgtatagaataacttggtataagccttggattctggaaactgacttctagaaatctgctatgcaattagcgctttgcaaacattaaacaaatactttatagtttattctctgtggttctctctctctttcttttttttttttttctttgagagagtttctttctatcacccaggctggagtgcagtggcataatcgcagcttattgcagcctcgacaatccgtgctcaagctattctctcacctcagccttctgagtaactgggagctttccgcgggcagagtggcaggtgccgcgccggaggtggtcatggtggagtgggcgtccctgctcggcgtcctgcctctctggttaccgcctccttcccgcactccgccgggggctagtccccggcaggtgtttggggagagtggtggggtttgctgagtcgcgggcgtcggagggttgtggcccggcggcccctgttccaggggtggccgcgcggacttggtggtggccgtcctgtccgcggcgggaggtgggcggggcaggcctggcgcccttcctcctctttctgccgcccgggagaccagccgaccgctggggagaggtgggaatgaaggtcagtggactcagactcaggccgcaagcgtcacacttggcctcttcccgcggtggccacgttgaccagatgtcggcctcgaaccgacagcctgaaaggtttaaggtccaccaggtggctctagcccgcagcagcaccgcatgtgtccagcagagggtgagatcccgtctaactgcagcctccactttccaggctcgcccaggtgatcctcccatctcggcctcccaagtacctgggactacagggatcttcttcctctgttttttgttttttgttaatttgcttgttttttttgacggtttccatttcatttccacagtactttgagttgctgttttattttttgttgttgttattttctctctctttttaaaatttcttacgctctttgcacactgaagttgctattgttttagatttactttttttttttttttttttttggagtcaggtcttctcactctgtcacccagactggagtgcgggttcgtgatcactgctcactgcagctttgacctccctaattgggacttacagagattgccctccagcctgggtgatggagaccctgtctgaaaaagagaaacagggacagagaccagttaaaaacacacacatacacacacattttttaaaaattaagtacaattaattgttatcttcattaccttttacttctgttcactcccacttattttattgttattattgtttggaataatttttgttattgtttgttattgttactgtttatttacttaattattattattattttgaaacagggcctcattctgtcacctaggctgcagtacagtggtacaatcttggcccactgtggccttaaacttttgggctcaagccatcttcccggcttagcctccctgcaagtagcaggaactacaggcatgtgccaccacgcctggctaatttgtgttttatttatttatttatttattgtagaaatgaggttccaccatgttgcccaggctggtctaggctagtctcaaagtcctgaactcaagtgatccatccaccttggcctcccgaagtgctgggattacaaacatgaaccaccatgccttgctatctatctatctatctatctatctatctatgtatctatctatctatcatctatctatctatgtatctatctatgtatctatctatgtatctatctatctatctatcatctatctatctatctatcatctatctgtctttttagtagacatgtggtctccctatgttgttcaggctctggtcaaatatattttttaactttaattattattattattattttttaatagagatgttgtctcaccaagctgcccaggagaatctcaaactcctgggctcaagctatcctcccaccttggcctcccaaagtgctgggatatagccatgaaccaccacactctgctctatctacctatctattcctttagcagagacacggtctcactatgttgtccaggctctggttatatatatttctttttaaatttcaattattattattattttaatagagatggggtctcgccacctatcccagtatggtctcgaactcatgggctcaagtgatcttccccccttggtctcccaaactcctgggattacaagcgtgagccacctggttatatttttgatgtgttgattctttgcagtttgtgttccagtccagatgcatagtgatagtacagggattgaaaacaaaaattttgacacagatcaatctcacgaacttaccttcctttctagtagctcctaatcaagtgaagtgctcctaatctctggtggttttaaatattgtaggaagcattgccctattttactctgtgcactgaagattttttctagttctggaatacagataaatctagagtctgttcttgatcaatcacaagaaaatcaataaacctttttccttattctacttccctttcttgaaagggagggccttgatttgcgttgctgcctgtagacagctatttgtctaatttttgttgaaactgggagaagactgagcctgacaaggctgcagggctgtgaggccctgcccctcaactaaaaaaaatatttaggggtacatatgcttgtttgttaaatgagcatactgcattctgctggggagtgggttccagtgcatccagtacccacatagcaaatgttgtatctgataggtgatttttcatccctcatccccctcccaccctcctcccttttggagtccctgagtgtgtatgcgctgtttagctccgactaataagtgagaacatgaagtatttgcttttctacgttggagttagttcactgagtgtaatggtctccagctccatccatgttgctgtaaaagacacgaaatcattccttatggctgcaccattggataattttagctttgttattggtctcccttccttccttccttccttccttccttccttccttccttccttccttccttccctccctccctccttctttccttccttccttccttcctccctccctctctttctctctctactttctttcttctttccttcatttttgttttcttttgtttgtttttttatctcagattacacacaccaaaatttatttttttgagacaggatcttactctgcccccctggctgcagtgcagtgggcatgatactagctcactacaacctcaaacctcctgcctcagcctccccagcctcctaagttggggcccagcgtgacgtgtgggtcaccaccttgccaaatcttttttttttttttttaaggaggtggattcaccctccccatgttgctcaggctggttctcaaactcctggcctattttaacatttttttttggtggggcagcgtggggcaactgctgcatagctgttctacatagggaaaatctatttttatgggaaagggggaaggagatacttcttgaaacttccctcttcaaatccagcttctggttgtttaaatgagcatctgttgtgaaatagaaaatattgaaaaataagaacagagataaaaagcacaaaataaagtttctcttgtcatcaccaagggtgtccctttgaccagaaagggaagttttagtactaaatcattcctctccctgaaaccaccattgcaaaattataaccaagacagtgaaaaatatctgacctaacaaactccattttgcttctaaccttcaagctgcccttgctcattcctgggaataggctgaactaactttggaaagaacttagtttatagattatagtttaaaacaaagatgataacaaccctttcccaaaacaaacctccttcttgcctggggactagactgccttcgtaggactaacaaattagtcacaagattaaaaattatggtttaggagtcatgcacctggaggctacaagattctgaccctctctaaactgctcctaagatcagtgcttgagctttttgcacaccagggtctgcacttgatggatcagctgccactactcagattgataaactggttcatatggtcttgtggcctccacccaggaactaaatccgtacaagaagacagcttagactctctatgatttcacttctgacctgaccaatcagcattctcgactcactggccttcccccacccaccaaattattcttaaaatctgtgatccccaaatgctcagggggacagatttgagcaataataaaattccagtctcccacacagcccactctgcatgaattactttctttgttgcaattcccctatcttgataaattcactctgtctaggcagtgggccaggttgggtgattacaacactagaggtgtacggaattccattgagaggcaaaaagtttatctggatatctagtgaccttggcctagggaaactgccttacgcttattataaaacataatgtgggggcaaagggagaggtttccctttggccctctgaagtttcactgagaaatcaactcatcaaaggcagatgaataagagaaaaggcagacacacgtttctgtgcacagagccttcataacgaagaccccaagacagtggggaaattgtgtttaggttttatttatttatttaagacagagtcttgttctgtcacccaggctggagtgcagtggcatcatcttgggtcactgcaacctctgcctcctgggttcaagcagttctccagcctcagcctcccaagtagctgagattacaagctcgtgccaccacacccggctaatttttgtgtttcttagtagagacggggtttcgccaagttgcccaagctggtctcgaactcctgacctcaggtgatccacccacctgttatggcatcaacagcattatataataagtgtagttattttttgagtaccccccttccttctctctctctctgtctctctttaaaataagctcaggcagatctaatccatttccaaagcctgaattcttttttttgtttgtttgtttgttttgagacagagtctcactctgttgcccaggctggagtgcagtcacacgatctcagctcactgcaaactccacctcccaggttcaagcgattctcctgtctcagcctcccaagtagctgggattacaggtgtgtgccaccacacccagctaatttttgtagttttagtagaggtagggttttaccatgttggccaggctggtcttgaactcctaacctcaggtgatctgcctgcctcggcctcccacagtgctgggattacaggcgtgagccaccgtgccccaaagcctgaattcttaatccaacattggatctctatcccaaatcctgtagagaaccagtaagttgatttctggacttggatgcctcatagacattacatattaataatgacccaaccctaaaactgggtttgcttcttcctcattcaactcagctgtgacccagacttactggctcaataaattgtaccactgttcacctaggatactgggagagtttactcaatctgtatctccccatgtcctaaacaacccgtgaccaagtcctgtccattcttcctccaatatgtatctccaaaaacttctctccatttccacaactacccatagccctttgtggagccactggctctttgaaggacatcggagaatttgtttcaggtttgcaggtatgaggccaaagcctgctaacattcctgccccagattttgtgtaaacaaaagtatctctgctgggggcattgagaccatacatacttctaggtttggatgactctcttgaaggatgcatgggaccccacaaaactgacacccccaacaaggtcagacatctgctactgcatggtccaaggcctccaccatagatcaccaccgttgtgagcctaaactgccaagggcaccaactccagggagactgttgggaagccagccttcctctgctaaagttgaaagtcacaggaacctccacccacaaggtccccactgcactctgaagatgtggagaatgagtgggtcagagagaaggcatggaggggagacttcctggccagaatgagtttcctaggctctggccaccccacccgtgtctcagcccacgagacaccactctctctcctcctcttctgtccacaagcccctgaagcccacacactgcaggtgagaaaaccacacagtgtgaatagaatagagcctgacacccttctcatgtgagtgtgtcctgagcacatagacgggaggtttgtttgacggtggcatcattgtttatctgcagctgtatcctagggaagcaattctcctattttctttttttgttttttttgttttgagatggagtctcgctctgtcggccaggctggagtgcagtggtgcaatctcggctcaccacaacctctgcctcctgggtttaagcgattctcctgcttcagcctcccgagtagctgggtctacaggcacgcgccaccatgccggactaatttttgtatttttagtagagaaggggtttcactatgttggccaggctggtctcgaactcctgaccttgttatctgcctgcctccgcctcccaaagtgctgagattacaggtatgaggcatcgtgccaggcaattctcctattttgattgaagggagcaagagctaatttcaggggggagtctatggaaagtccgattctcccacaggctgcagactagaaatgaatatggcttcttgggcagtggggattcaaatgaatatggctttttggacggagggaattcctttggccttcacgttttcgggagcttctctcaaaccctcccttgaggctagagaatagattcccccgacatttcctcaagtgcccgatgtatcctgtcaagcgacccaaggacgacacattgagttaaaaacccccgttggttataactggagattttagattcaggccacacctcactctacgtcacagaatgcgcttttccagaagctaagcagaggagctgggctccagagagaggaaggggctgagaaaagcacaggcggagaaaagacgatttttcttacagggctaaaatgcaggggacttccttatcctgccgacttagagaagcccggccccttgtgatccattgctgaaagccgcctcgtgtttgaaaaacggatccgctcccaacttcagtggaaggacatgacatgtagcacgaggtattctgttccttctgatgtggtctgctcagcggggcctaaggctggagttcgcccacaccaatggctccctctgcatggggttccatcatctctaccctagaacatggtccttggcgaattctggctcttaagtcgctgtccaaaaccccatcccatgctcaggctacccgaatgaccttcgcttgcacctttccagaaacgtttcaaatctatcctccatgcatggccacctaaaaatgcagaagcacagaacactcggtcgccattcacctcactgctttcaggagagaatgctcaaggtctcttgctgactttttttttttaacggagtttcgctcttgtcgcccaggctggagtgcagtggcgcgatctcggctcactgcaacctccgcctcctgggttcaagtgattctcctgcctcagcctcccaagtagctgggatacaggcgcccgccaccacgcccggctaatttttgtatttttagtagagacggggtttcgccaagttggtcaggctagtctcgaactcctgacctcgggtaatccacccgcctcagcctgccaaagtgctaggattacaggcgtgagccactgctcccagtctctttctgaatcttgactctgtgggcaccgcccgttagggaggctcgcgtccctgcccaggggccttcattaaccgaaggggacgtgccacgctgggggtgttcgaggtgtgggaggcctcctctgctggcgtcccacctctccgtttaccgccttctcccatcactccgctgggggctcatcccctgagacggggtccgggagcgtggtggaaatgatcgaggtgtagaggttggagggtcgtggcccagcggcttctgtcccagggggtggcggcgcgggcccgggggtggccatctgggtcccagcccttccttccctgtagcaggggcggacgaggtgcatcctgttccacccctgcacccttctcctccccgcccccctccgggtggaccagcagaccgcgggctgtggtgggaaggtgggcgggcttatgccaccagccgcccccactgcgccgcccacgtctaaggctccagctgggcggaacagtctcaggtctggagcgccacacttggctgtagggtggacccggtgcgccactgcccacggccaccggctggcttctcagtcgggccactgggtcgaccagatgtgggctgcgagccgcgaacattgctcttggccactagctcgaaatactaaaggtcaacctaaatatttaatatcaaacatttaaatatttacgcacggcagtgcctcctaggtccagcggaggggtgtgatcaggcctcgctgtggccttgaacccacgcccctactctcgggctcgcccaagtggccatcccatttctgtcttcagaggagccaggattccagggatcttcctgtgattttttttctagttccacttccattttctttcctcagtactttgagttgtttttccttgttctctgtctcttaacactccttcctgcacattaaagttgctgttttgatttctttctttcgtcttgtttttctttcttttttctgagtgaagtcttctcactctgtcacgcaggttagagtacagttgggtgatcacggctccctgcagcctcgacctccctgggctcaggggttgctcctgtctcagcctcccaagtggctgaaactacagggatcgcttcagcctgggaggtcgaggctgcagtgagccatgattgtgccattgccctacagcctgggtaacagaagaaccctgccagaaagagagagagggggtaaaattaattgggatcttatttaccttttgccttcgttcactccattttaaaaaaaaattaatattgtttgttctttctttgtcacttgttattgtttgtttttattatttatttttatttttagacagggtctcactttgtcacccaggctgcagtataatggcgtgatcttgactcacagcagcctcaacttcccaggttcaagcaatcctctcatttcagcctccccaactccctagtagctgagactacaagcacacaccacctgctggctaaccttattttgtgctttgtacattttatttttgtagagacagggttccaccatgttttctgtgcacgagcaatctgcccaccttggcctcccaaagtgctggaattacaggcgtgagccactgcgcctggcttgctctatcatctatctatctatctatctatctatctatctatctatctatctaaactatctatatctatctatcatatctatctatctatctaaactatctatatctatcttatctatctatcatatctatctatctatctatctatctatctatctatctatctacctacctacctttgtagcagagatgtgttctcactgtggtgtccagggtctgctcatatatatttcttttttaacgttattattatttcatgagatggagtctcattgtgttgcccaggctggagtgcagtggtgggatcttggctcactgcaacctctgcctcctgggtctaagcaattctcccacttcagcctcccaagtagctgggactacaggtgcgtaccactatgcctggctaatttttgtatttttagtagagatggggtttctccatgttggccaagctggtcttgaactcctgacctcaaatgatccactcacctcggcctcccaaagtgctgggattacaggcatgagccaccgtgtccatcccggtcatattttttatgtgttgatttttttcggtttgtgttacagtccaagtgcgtagtgatagtaccgggatagaaaacaaaaatgtcgagacagatcaatctcaggaacctgtttttttttggttggttggttgtttttaggggcacaagccccattgagtgaagtgctcctaatctctggtggttttgaatattgtagaaagcattgcagtatttaactctgtgcactgaagattttttctaattctagaatacagataaatctagatgtatggttctcgatcaatcacaaaagttcaatagcctttttccttattctacttctctttcttgaagggaaggaccttgattcagatttgctgcctacagacagcaatttgtctacattattttctcttctttttcttattgggagggaactgagcctgagaaaactgcagggccatgagctgttagattacttccaatgagaggaaaggaagtgtgtgtgacaacacattcggagagaaatcaggggaggtggcagagcaggaagcaccaggaatctgtctccccacgtaggccaaagggaagctggcaggatctatctgatggagcgatttggcaactctggagtctatgggaggcctgctgctgccagggggaagcctggaagatacattgtaatcagtgccagttcccattagctctttgtttcccacccccaccctctctgtgcccccctcaggccagagtcacagcggtggaaaggcttctaaggagaggtatgtgggaaggttctcctacaagtcaggttctttaagctgagcttattttatttctggtctcatgttcaccagaataaagaagatattccttaatgactcgatggccttagtttattttctgctcacaggtttgagctataaaaaccaatttttcttcatatgcaatacatgaaaactatgtatgtcagaacatgcttctcttagtgtactcttggggatatagtttaaacagcaaataaaatttggcatgtatggaagtttctttttatattatcaagagtacaaatatctatcaaaatctttacctcttatgtctctaatctgtatgaatacaaagagcatgatagttagatctgcacatagatatttataggtagataaacacaaacataaaattatgagtttgtctatgcaaatatttatgtatacaaaataagttcaagagaaaataagttcaagagacattctcctccagcgaaaactgatgttgcagacatagacttacgttcacctatatggctctataccatctcaggctggaacccagctatgcaatgttatgtataaaaatcaacaaagattagcattgagggacacagcccaggaagtaagcgtccagtactgttatgtaaggtttcatggaaagcttggaatttgaaggccctgcttttttcttttcactgtatacctctgttatttatatccaccatttggggcctttcttgatgcttctgcttccccaaattagctaattgtctgattatatttgcctgggctgagctaattggctgattaaaatcacctgagcttagctaattggcttatagaattcacctggtctggatgggtaggaaaggaaaatgaactttgatcttctcttcttctgaggattttttttttttaccaggcataagcacaaatggactctagctagatacaactatgtgaaccattctgggtgtatatgtttcactattcacatatcttatatcgataaatacatatacaaagcaaagcaaaacgaagctaggtaagaggtcatttttattttcattctttccagaccgggtgaatcaaatcagcctattagctcagtggtgatttacccaatccaagccacatattgcatcacgttcttttttttttttttttttttttgacagagtcttgctccaggctggagtgcaatggcgtgagctgggattacaggcgtgtgccacaaagcctggctaatttttgtatttttagtagagatggggtttcaccgtgttggccaggatggtcttgaactcctgccctcttgatccacccacctcggcctccaaaactgctgggataacaggcgtgagccactgcacccggccatattattcttataaatgtgtaaatgttcttgttacctggcactcgagtgtttttaattcaggatctaattaaatccgctcagtggaattctaaccatacagctaggacaagtctgaggtgcctgacaccaggaaccctagcctttctcacatagaagccttagcctggagaataagagccagcattgacatttcagcacatgttcactatcacctggttgaaatatggccagggtccagctttacatgataatgaatgactcccctggccttagtgcatttttatttcctagaagaaagaaactagaaacaatgctttcttcatatatgttaaatgcagcaggttgtatttaaaaacatccttctatatgtgtgattctggatatagtttataagacagttaagattatgcatatgtataaaagtattttttataccactattagaatcaatacctatcaatacttccattttccacatttttattctgtatgaatatacatacaaagctaaatatatttgcatatagatatacataggtagaaaggtaaacaaaaacccatgcaggattatatgagtatgtttatgtgaacatttatgtatacaaagcatgttctgaaaagacattttaaatgctctagtatatactaagaacacaaatgtatactaacttcggtactctatggcacaataacatctcataatgaaacagagccaagcaatgttgtttgtataagtgtaaagaaagcttcaggttcagggaataaatctagacagtaagctgacagtacagctatgtaatgctatatttccaggctagcatttcagactattgctttgtttctcactgtatcaacatgctatttgcattcactatattaggcctgacttgatgaatctgcagtccctatttagacaattgcataattggatctgcctgagtcgagctaactagcttattaaagtcacctggactgagctaattggctgattggattcacctgagctgagctcattgactgattgggttcactgtttctaaagagaatgtgtagaaaaatgacctctgatttacttttattttggggctgttttagaaaaaaatacagattgacatcacctagacatatttacataaccctgtgtgtttgtatatgtttatctatctatctcatatttatatcaaaatctacagagaaatgtgtccaataaaactaacttttttttcagtattgaagtaaatgctcaagttacagcccttggcttttattctcttacccaaaaagtcactacttcagcaaagaaaacaaaaatacaaggttttattcctatgacatatttaaaatgattatttgaatttatgaaagctttaaagacaattattcagcactttcacatttgagtgagagcctttaaactgaggctattttatttctggtcctatgtttaccagaaagagaagggtcacccttgacctggcaatgaatgtttcataacctcagtgcatttttgtttttcagaagtgagcaacaaggaatgatgcttcctttgtgtctgttaaaagcagaaagatgtatgtaagagcatagttccatttttgcactattttttgtatagtttatgggaaagttaagtttatacatctataatagcatctttctatgtcactgtcattatcaatatctatcaatatttccactttatacaacactattcttattttttattgagacaggttctcactctgtcacccaggctggagagcagtggaaccatgtaggttcactacaacctctgtaccctgggttcaagtgatcctcccacttcagcctcccaagtagctgggaccacaggcacatactaccacatctggctctttaagacccttgagctcaagcaatccacccccctcaacctcctgaagtgctaaaattacaggtgtgaaccaccgcacctggtcatacatcattattttttataaatacagatacaaagatggatgcatctgaatatagacatacgtagataaacatacacacacatacaggattatatgactacatctgtgtaaatattaatgtatacacattatgttggccaaaagacattttcaataccctagtatatattataaagatgtagaattaattctctactctgacacaatagtattccagaatgaaacatagacatacaatgttgtttgtttaaatgtaaacaaagcttcccctacatgagagatttgggaagatgatagtacactaatgtaatagtttatgttcagattagcattttatggccctgcttttgttttcaatatatgaatgtgctactctcgtcaaccattgtaattctgccttgaggaattcactgttgatgttttgataattgactgattgagtctatcttcgctaactggctgattggaatcacctgacctaagctaattggctgattttattcacctgggctgagctaattggctaattggattacctgggttgagctaatgaatgattgaaatcacctggagtgacctaatcagctgaatgaattaacctgtcttgagggaaatgagtagtaaaataatgtcttagttttgaggcttctttatgagacacaatcacaaatggaaattacatagacgtatctgcataaccctgtgatttgtatatattaattcatttacatattttatatctgtatctaaatctacaaaaaaactatccaaagaaaacttaaatttcctttcagaatagcagactaatttttagtcacagactttaattttttttctctacctaaaaagttacttctctagccaacaaaataaaacaaaaaaatccccaaattatcatgctatgtcatatattcatacaaaagatcccctgaatttctggaagtttaaagaaaattattcggcatttgcaaatttggggcaaagctggggctaatgtatctctcgtctcagttcactagaatgaaaagggtcattcttgacttggcagtgaatgactctcatggccttagtacattttctgtttacagatgtgagcaacaagggccaattctttcttcatatacattaaatgcagcagaatgtatgtcagagaatacctccatttgtgtactcttgcggatgtagtttaaaaggcaaataggattttatgtgtatggaagtttttttaattgctatcagtagaaatacctatcaatactttcaccttctctctctttattctgtatgaatatgtatagaatgatagataaatctggatatagttatgcataaggagataaacacacatacagaattatatgtttgtctacataaatgttcttgtatgcagaagacttttttgagaggcatttttaatatcccattctgtctggaagatgaagacctagacttactctcacctatatggctccataccatcacagactgaaatacagacatataatgttctgtataagtatcaacaaaactttatgttaaggggcaaagcctgagaaggaagcttccattcctgccaaataagactttatgttgaccttaaaattttagggccctgcttttctactcgctctatgactgtgttgtaggccattttgtgcctgccttgatgctttcgtctttcacatttagctaatgggctattcacactatctccactgagtggattggccaactgaatttgcctggctgagctaattggtttcttgaattcacctggtttgcaggagttgtgaagggaaatgacctctgatatgcttttttcttgaggctttttaaccagatatatggatacatggactttgcatgaacatacacaggggacccattctgtgtgtgtatgtttatttattcactaatcttatatttttatctatatgtacaaaaaaagcccccaagaaaaaaataggtcaggaatacttcgaattttctttccctccaggccagatgaatccaaatagtcaattaactcagtgaagattgatccaatccaagccacacacatcacattattcttataaatgtaaaaatgtccttgtcacctggcacccggttgtttgtaatgtagtgtctcatcaaaccagcttagtgtggttgtaatcatccatttatgaagagccagagatgcctgaaaacattgagcctgacctttctcacaaaaaagctttgacatcaccaaaaaaatttacctttggcattttgcacatgttcactattgtctggttgaaatttggccaggtaccatataccaagatatttgtgttcaatatcacagtctatcttctgaaaacaggcctaatttttttattaccataaaagtcatattacagccacaaagaaaaaaatacaaaaacgtatttttacaacacatgctcagagttaagaacaagagcccttttcgtgatgaaagctttaataggaagaaataagcattctcaaatttgagttatagcctttgaaatggggctaatttatcactggaataaaaagatcattcttgacctggcagtgaatgactcgcatgactttagggcttttctaactcccagaatggagcaataaggatcactgctatatatatatatatatatatatacacacacacacacacacatatatatacacattaaatctaacaggaggtatttcacagtctatctttatttgcatactattctagacataatttacagggcagataagtctatatatatattgaagtttttatattactttctgtatgaatacctcccaatacatctatcttctatgtctttattctatatgaatataggtaccaagatgaatacatctgaatatagacatacatgggtagattttaaaaaacacagaaacagaattatgtgagtatgttaatgaggtaactggctgactgtaaccacctgggcttagctaaatggctatttggaaccacattggtttagataactggctgattgtattcacctgggctgagttaactggcttattggaatcacatgttttgagctaattggccaaatgaatttacatgggctaggctaattgacttattgaaatcaccttgtcttagctagttggctttttagaatcacccaggctgagctaattgactgattagattcacctggactgagctatttggttctttagaatcacataggctgggctaattggctgattgtattcacctgagttgaggtaatttgctgattggaatcacctgccttgagctaattgtctgattggattcacctgtcatgagagagattagtaggaaattaatcactgagtcccatttattttggggtttttttttacaagacatactcacagatgaacattacatagatatatttatacaaccctatgtgttttatatgtttatttacctacatgtcttatatctgtatctaagtctacagagaaaaacatccaagaaactctgaaatttgctttaagcattgtagtctatcttcgagtaataacgcctagattttcttgccttactcaaaaactcacttcttcagccagtaaaagaaatacaatacagataattatattttcatttcccatgggaaaaaaaatcctctacattgatggaagctgtaaagagaatattttagcactttcaaatttgaaggagggattttaagctgagactactttatctctagtcctgtgttcatcagaaaaaaagggtcactttgacctagcaattaatgttttacatggccttattgtatttttatctcctagaagttagaaacaaagaccaaggcttccttcttatatgctaaattcagagagacgcacaaagagcatacctacatttgtgtactaatttagatatagggcagataagcttatacatctatgaaagtatctttgtatattactattatattataaatagtatgattaatattaaactattgtatattactattatctttgtatattactatcagtatatagtatacacttctactctctacatatctgttcttttttttttttttttgaggtggagtcttgctttgttgcccagactggagtgcagtggtgtgatattggctcactgcaacttctgcctcctgggttcaagcaatttttctgcctcagtctcccaagtagctgggactacaggtgcacgccaccacatgcagcaaatttttgcatttttagtagagacagagttttaccatattggccaggctggtctcaaactcctgacctcgtgatctgcccgccttggcctcccaaagtgctgggattataggcgtgagccaccacgcccagcaacatatctgtactttaccaatattgagacaaagataaatacatctggacataaatttgcataggtagttagataaatgaacacacacatactagattatatgagtaaatctatgtaaatatttatgtatatacaggatgttcaccaacagacattttagtaccccactacatactaaaaatgcagatgtggacttactccccaatctctggcacaatagcaatttagaatggaacacagccatacaatgtttgtataaacgttttcaaagcttcgtctctaaaggcaaggtctggaaggtgagctaaccataaagctatgtaaatctttatgtccaggttagcatttcagagtcctgctttgcttctcagtgtatgaacgtgctaatctccttcaccattttgggcctgccttgaagtatccattgtcaccattttgataatttgctgattgggtctaactggcctatgctaattggctgattggaattacctgaactcagctacttggacagttgagttcacctgagctaaactaactgattaaaaatcacctgggcttaaggctgggtgcagtgattcatgcctgtaatcccaccattttaggaggccgaggcagatggatctttttgagtgcagaagttagagacaaaaaaaagaagttcaagaccaggagaccagcctaggtaacatgggataaccccatctctacaagaaatacaaaaattagtcacacatggtggcacatgcctgtggtctcagctactcaggaggctgaggctggagattgctagaacctgggaggcagacattgcagtgagccaagatcgcacaactgcactccagcctgggggacagagtgagaccctgtctcagaaaaagttcacctaggctgagttaattggctgactgaaatgaccagggcttagctaattggctaattagaatcaactggtgtgtcataattgactgataagactcacccaggctcagctaattaatagattgacatcacctttgctgagctaattaattgactgattagaatcattttggctgacctaatcagctaatatgaatcacctgggctgaactaattggctgattgtattcacgcgtgttgagaagcatgagtagggtaatgacttctgacatacttttatttttttccaagacatactcataaatggtcattgcatacacatatttatataaccctgcatgttatataacctacagaagaaagtgtccaaggaaaactaaaattcactgtcagtacagcagtgtatcttcaagttacagacctcgactattcattccctaccaaataaagttgcttctccagccaacaaaacaaaagacaagaatttacttttttttgtcatatgttcaaaaaaaaaaaaaaagaatcacctgaattggtggaagctttaaagaaaagttttcagcatttgcacatttgggttagggcttttcagcagaggctagtttatttttggttctgtgttcactagaataaaaagggttatccttgatttagcgtgaatgactctcatggccttagtgaattttcatctcccagaagtcagcaacaaggactaatgcttactttgtataagttaaatgcagatggatggacgttatagcacgcctccatttgtgtactactctctagacagagtttataggccagaacattgtatacatctatggaattatctttatatatcactatcagtatcaatacctatcaacccttccaccttctacatctttaatttttatgaataaaaatacaaaataaatatatctggatatagatattcataggtagataaacacacatactgaattatataagtacatctatgtaaatatttaggtgtacacaggatgttcacaaaaagacattttcaataccttagtatataatcaggatgtggatacgaacttactaccctactctatgccacaatacaaacccagaattgtacattgtcatacaatgttgtttatataaacataaagcttcactttcaaaggtgaggtctttgaagtaagctgacagcatagcaatttaatgctttatgaccagattagcatttcaggaacctgcctaccttctcagtgtaggaatgtgctgtcacgtctactattttgggcctgacttgatgaatctgcagtcgctatttagataactgtttgattgaatccaagtttgctgagctaattggctgattcttttgcctgggccctgcctgcagaagtcattttgacgtatctatggtcccatcagagatgtgactgtcctcttatgcccagaccctgttcacagtgaagattgtgacatatggcttggcttagcacctaagtgatgtgactctcctattatgcttgggccctgcctacaggggttattgtgacataaagctgagcccagctcctatgttatgtgactctcttcttcttcctgagcccaacctacaggggcaatgtttacatatctctgggctaaacatatctctctgccagttaaacagttttcttctgttcatctctaatggaagtttgtaaatggcactacttagtgaatggaatagctttctaaaagctcaggtgctactgagaagctgacacaggatttcagtgcacttaattctaatcaagcaacaggactcaacctaggaagaaacagctggggaaaagaacctgggcaatgtgacactccatcctgggcactcccattaggggggattgtgacatatctttaaacctatcaactatttgatgtgactctcctgtctcacctgggctttgcccatgggcaagattgtgacatatgtattgggccataacccaggtgttgtgactcatttctcctgcctgataactgctcccagagtggattgtggcatatggttgggttcaacaccaagttggtgttgctcttttgccttggccctgcactcaggagacactgtgccatttcactgggctcagcaccgaggtgatgtgaatctcctgccttgaatctgttcgggggggacattgtgacatatctcagggctcatcaacttacaacatatttgagatgactcttttatctgatgtgggccttgcctattaaagtaattgtgacatatctctgggcccagtacctaggtgacatgactctactctcctgcctggactttgtccacagaagggagagtgattatcactgagcccagcacacaggtcatttaatacttctgcgttggccctgtccacatgttcattgtgatataactctgggcccatgccctaggcaatgtcactctcctctttcgcctgggccctctccttagtggggattgtgacatattacttctcctagcacctaggcgatggaacttcctctcatgcccgggccctgcctatgtgagtgattgaatagatggctagacgcagcctctatattatgccactctcttcttcctgagctctacccacaaaggtattgtaacatctctgaacccctctcctaggtgatttgacgcttctttctgaaccctttcctcaggggctgttgtgacctattactaaacacagcacctaggtgatctgacttttctacactgcttgggttctgcccacaatatagattttaatttatagctgagagccacacctaggtgatgttactctcctatcctgcctgatccctggatacattgtgtattgtgacatatcactgggtccaacagttaggtgatgtgaccctcctgcatgggccctgacaccaggagtattatgggatatctttgattcatcaccttggtgatgtgaccttcctcttctgcctgggacatgctaaaaacggggattgtgacacatccctgtaccagcacctaggcgatgtgaccgttcttttgcccgggccccatatactttgagtattttaacatattgctgggctcaacatccatgggatagtacactcctgcctgggccttgcccacagggagacttgtgacatatctctgcatgcatcacctagatgttgtgactcttcttttctacctgcaccctgccaacaggaaggattgtgacatatcgctgggcttagcaactaggtaatgtgtctctcctgcgtggccttttccacaggggtcattgtgacctatcgctgggcccagcacccaggtaatgtgattcttattgcctgtgccctgctcacagagtaaattgggacatatcactgtgcccaacacccaggtgacatgactctgctgcttgtgccctgctttcaggagaagattgtgacatatctttggccaagcacccaggtgttgtgactttttttttcctgcctgcgtcctgccacagtgaaaattgtgacatatcactggaccagcactcgggatttgacatcccttctcactctctatgcacaggtggtattgtgatgtatagtttggcctagttcacaggtgtgatgattactctcatactttgaaccagctagtaggagagatactgtcttttgtagcttgacttagcaaaacaagagtctgggttatttcctttcacaaaaatcacaggggattatcatgctcttgcctatcacataaagcccttgggtggtacagggtgtcataaaggggcccagcatagaggtgagattgtgtctctcatatgcaaactttgccaaccgttaagatggtcacccttgcatgtggtcagaggccactcatgagatcctaaatctcaagaaaagatgcagtccacggttagaattgtgagagtcacatgcgaatatccagatagaattgggatggtgactcatttctaaactaagcttataggttcattgagcactctcacatctggacccagccaattggagagatgttgatgtgggcttatggccacaggtaagatcgtgggcccataccagcctgaaggtatcagagcagatcgtgactctcacacatatcataaaaagccctcaactggtacagagagtatcctaacgtgactcagcacacaagtgagatcgtgtctgctgtacacatgcccagatgacagtaaagattgtcatccattaacactaacacagcccattgctgaggtcctgaatctcacacccagaagcagttgaaagttggaaaattgactctcatatgtgaatccggtccacaggtgggttggtgactctcagaccaagactcagcactctcgtgaggttgtgactccgctaaggagacaggctgcgggacggattgaggctttcacgcgtggctccagtccactgttgagactgtgaatcacgtacttagactcaacatacaggaggtgtttcctctcatacctgtaattgagaaatgtgcaggattgttaatctcatccctggcctttcatgcaggtgtgattgtgccctcaaaaggcattgtgaaatattggcgggcccagctcaaaggtgatatgaaatatgcctctccagcatttgagttattttacttttctgtgagagcccagtccacagatgggattgtgacattgctagacccaacaactaggtaatgtgactctattctcctgcattggcattgtccaaagaaggcaaataacacattacttgtcttcgcactcaggtgatgactcttctcctgccttggcactgtgcacagggggcattgtgacatatcactgggctctacacccaggttatgtaacttccatgcctgggccctgtgcatagtggccattgtgacatatttcttgctctacaactcagattgtaactattctgccttgccccctgcctgcaaagggcattgtgacacacctctgtgaacatcacaaaggtgatgtgactctcttccaaaatgggattgtggccaggtgcagtggctcatgcctgtaatcccagcactttgggaggctgagtcgaggggatcatctgaggtcaggagttcgaggccagcctggccaacatggtgaaatcccgtctctattaaaaatacaaaaattagccaggtgtggtggtgcacacttgtaatcccagctacttgggaggctgaggcaggagaatcacttgaacccttgaggcagaggttgcagtgagctgagatcacgccattgcactccagcctgggcaacgagagtgaaactctgtctcaaaaaacaaaaaacaaaaaaagctccaaaaaaccaaaatgagattgtgacatatcactggaccgagcaccttggtgatgtgactatcctctcttgcttgagtttcacatattattgttactgtgacatacctctgtgacaaacagctatgggtaggaaaacttctgcctggactcagcccaaggcggcctcatgacttttttaaaagatatgtgactttaaaaatgtgactgtcattttctgcctatgctttgccctcaggaaagattgtggcatattactgaactaagcaacctagtgacgtgtctcttctgactggggcttgcccacagagacaactgtgacatagcactgagcccaggacccaggtgatgtgactctgctgcctgtttccaacattcatgagaggatggtaactatcccttgccaagaactcaggtgatttgactgtcctgccttgttgctgccctcagagaagattgtgatatatcttcagccccaaacccaggtaatgtgacttccctgcttactccctattcagaggagaaattattacatataacctggcccagctcacaggtttgatgacaattctcatacctcaaacaagccaatagaagagatactgtctctctcagcgaggcttaggaaaactggtaaaatacctgtgtctcctctttgtatgaaggtcatagagaactaccacgtgctttgtatatggcataaagctcttgagtggtacagtggtacagagagtgtccacatgtcctaaaacaaaggggatattgtgtttcttgtatacacacccagacacctgttaggattgtcaccctaacacctggatacagaccattggtgaggtcttgtgtctcacatgcagatgcaatccacagtttgattcctgactgtcaaatgtaaacacctgtccaaagttgggatggtgactcatttctaaacccagctcatagacaagtgaggactcttctgtctggcccagttaatccgagaaatattaacttttctacctgggcttagggagcagcataaaggtctcggggcaaattgtggctctcattcctagtctacaatgatcttgggtagtattaaatgtcctaacggggttcagcgcacaggtgagattgtgacagtgatatccacacccaactgacagtaaaacttgccatctttcctcatggatacagcccactgttgaggtgttgaatctcataaccaaaggcagttgaaaattaaaacattgtctctcattggtagacccagtccacaggggggttggtgactctcagaccaaaattcagcacagttatgaggtcgtcactccactaagaaaacggaattcccagaacaaattgagactgtcatgcacaaatccagcccaccactgagattgtgactcatttacttagacccaacatataggaagtgttgactcttatacctagaattgggacatgtgtaagattgttcatcttttcctcagactttcctgcaggagtgatgctgacatgttcctctatttggcatctgagtgatatgactcttgccatggtctagcccacagatggaattgtgatgtgttgctgtacccagcacctaggtgatgtaactccatttttctgccttggcattgctcacaaaaggtattttgacatatctctggggtatgtacccaggtttcatgactctcttgcctgtgccctgtccacaaattgtcatgaaatattgctgggtccaacacccagggatgtaactctcatgcctaggccctgccaacagggggaattgtgacaaatctgtgtcaataacccaggttatgtgactctctttttttgcctggtccctgctcacagagggcattatgacatattgctgaactcagcacctaactgatgtgattctcctttctagtttttgcccacaggggagattgtgacatatcactgggcctcaaactaaggtgaagttacactttcattttcgaactgtactcagaaggcatcgtgacatattcctgggcccagcaccaaggtgatgtgagtctcctgcctgcactttgcccacaaatggcattgtaacatatctttagacctatcaactacttgatatgacttatttttttaaagtgaaagcaagtttattagagaagtaaataaacaaaagaatggctactccatagacagagaagacctcagggctgctcattggctcttttcatggttatttcttgagtacatactaaacaagggatggattatttgtgagttttccagggaaaggatgggcaatttccagaactcagggtgccttccctttttagaccatataggataccttcctaacattgccatgacatttgtaaagtgtcatggtgctgttgggagtgtcttttagcatactgatgcattacatttagtgtataatgagcagtgaggactaacagaggtcactttcattgcagtttttctttcggtgggtttttgctgtcttttgtcctgtatcctcttttatcagcaaggtgtttgtgaatggtaccttgtggtgacctcttgtcttatcctgtgacatagaatgcctgatcttctgagagcacaggaattgggttaattcctttctttttgaggtctccagataactcggggctcttgggcctggcagaaagtgacactccttacttgcacaggtcaggacccctgcgcagggactgtgtagacaaggaagaaggccaattttcccaaagggcttctactagctctacaaatcaagtatgatttctcaaagaccatgattccagtcaaagccttggtaaaataacctgtgtctcccattgtgtcctgttgcaagtgaaaacatgtttattgtacttatgcaaataactatattgccataaatcaagaatattcaccaatatctttgcacattctggacaaatcagggaaagagaaacaaaatactccaaattatgtttacaggagtatatgttactcaattgttaaaagctgtaaataactcaaaagtgctcttgactctgaaaaacaaaggatccacaacattttaagcaaaaagccaaaaaatattacttccatcttttattagttcagttcatgcagtaaactcttgttctgcttgatatttattaatatttcagctttccatgagagtcttgaaagtttttcccctgttctaattttgcagtcttcaaagttatcagaaatttgcatttgaaagcacccatcaatgttccagagcagactataaattatcttttgaaaaggattaaaacaagacaacaattgtctgtgggtgacaaaaaaagtcctaggacagccattattaaagccacagttaactagaaatattggttactcttgtggaataaacaattttacataacaattataactattaacaacatactatacactaagttatatcagacttacaggagttttccataatttcagaacactcactaatgacatatttatacaaatacaaccccaagaaagccaaataccatttcatatttgacaatacattctgtataattttataccaaataaatcgaatatattatttttggactttaggtgacctaatatctaaaagattaattaggtcagaaaagatgaaatgtataatttaattttggaaagtttttcaaataacaaaggtttaaaatattttacattataaaatcaaatcccagttcaccctatgtcattcatttagccaaaacagtaacttttctttttaaaatttttttaaaagccaaaaacttttacttactaataaaggaaagacatagctttccaaacagtctgtctcttgtctttcttcctgtactttattcaaaagacaaacaaaaatctttcattttttaaatacaacatgaaaatctggttcaagagtggaagcctatatttcacctttgtgttagtatagtaatgatgccaaagttcttaataaaatcttatatacaacatatcaaagcttaattagtttgactataaggtaagattctcagaaatcttttacaaccctttaaaatttttgttaaacggcaaatctgtgctctaaaaaaaacctgttgagcttttattccaatgttcaatttatggaaaaactgaatatctatttaactttagccagtatgttcacacacagaatttttttatgagattaaatttttaaaaaccttccacaacttgctcaaaccttcaggtttattctaacttaaaacaaccctttagatctctaaccgaggccccaatattaacattcttatgcctttttataatcttatactgaaagcacattctatttttcttacacaccttgcatgtaaagctgtttttatttcccaaagattacttatgtcacatgaactaaaaggcattcacacatggacacagtgcactggtgaggtcttcaacctcatatgcggatgcagttcagttggaattgtgactgtcatatgtgaacatccagccacaattgggatggtgactcatttctaaacccagcacatagacagttgagaaacttctatctggaccaaatctactgaagagatgttgactctcatgaatgagcttagggtcacaggtacaatcatgggtgcatgctagcacgaaggtctcagagcagattttgactctcatgcataccatataaataccttgaatggtagagagagtgtccccacaaggcccaacacacaggtaacattgtgattatcccatgcacaggtggctaatagtaaagactgtcattcttccacatgaatacagcccactgttgaggttctgaatctcccacccagaggcagtggaaagttggagaattaactctcatacatggatctgatccatagacgagttggtgactctcagactaagactcccaacaacagtgaggttgtgacttcactaagggaacacagttttcaggagagatttagtctcttgtgtacaaattcagtcccctgttgagattgtgactcacatgcttagcccaaacctacaggtgttgactctcatacctggaactggaaagtgtgtgggattaatctcatccctggaccttcctataggtgtgaatctgatatatgcctctgcccagaatctgagtgattctcctgcctgggtccagccttcagcagagatcatgacatatcacttggtgcagcacttagctgatgtaacctattctcctgccttggctctgcccatagaaggcattgtgatgtattgccaggccctgcacccaggttatgtgatttctgcctgtgccctgaccacattggctattttgacatattgcactgtccaacaccaggtgatgttacttttccacctgcgcccttccaacagcggacattataaactgtctctgtgcccatcacttatgtgttctgactttcttctcctgcatggtttctgctcacaggaggaattgggacatatcccagggctcagcacccagttgatgtgactcttcttttttttctatgttctgctcacacaaaagatattgacctattgctgggcccaacaccaaggtgatattactctttcactttagccctaccctcagaaggcatggtgacatattgctgggcccaacgcaaaagagatttgagtcctttgcctggaccctgcttacaagggggcattgtgatatatctctgggcccatagactatttgatctgagtctcctctctttcctgggctttacctagagtaggcattgtgatatatctctgggctctgcacccagctaatttgacttgcctcttctgtctgggccatgactacaggtaagagtgacttatcaggacccagcacacaagtgatgtggttcttctgcctgctctctgcccacaggcatcattgatacatatctgtggtcccaaaatatagataatgtgactctttttttgggtgggaagggacatgtccacagtggggattttgacataatgcttggcacagcatttatgttatttgactctcctcttatggttaggctctacccactggggtaattgtgacatatatctgggtgcagcccctaggttttatggctatcctcttttccatgatccctactcatagcatacattgtgacatatctctgattttctcacctaggttatgtgactttcttgtctttgcccttccattagagggtattgtgacatattgctaggtccattatgtaggtgatgtgactcttcacctgtcccttcacccaaaaggtgaagagagacattgtgaaacatctctgagccaatttcctacataatgtgcctcttctctgctgcctgagaaatgcccccaaaggggattgtgacatatctctgggcccagcacctgaatgttgtgactctcctgcctggactctacctagagaaaatattatgatatgtcacttggccctgcacacaaatgatgttactctcctgcctgggccttacttatagaggggattgagatattttccaggtgaagaattcaggtgatgtcactctcatttctcagcctttctcacaggtaagattgtgacatattactcagcccagcacacagatgaaatttttcctcttgtatgcaaacccagccaacagttgctattgtcaccataacacatgaataaagaccactgttgaggtcctgaatcttatatgtgaacacatcaacagttggaattgtgactgtcttatgtatttctcaccagaagtgggatagtgactcatttctggattcagctcacaggaatggtgataactctcatacctggacgaagccagtaagagagatgttgactctggtagctatgcttaggggtctgggtcttttacttgtaagaaggtaacagaagattatgacacttacacatacggtataaagcttttgggcaatacagagtgccattacagggcccagtccacaggtgagattgtaactctcctatacacacctagccaacagtttgaattgccaccctcacacatagaccgagcccattggtgaggtcctgaatctcacacatgaacctattccaccattgaaattatactgtccggccatggtggccgcgggtggtggttggcgcggctgcgctgcggcccagggcagtgcggagccgggacagtcgcggcgctgacgcccgcgggccccagctgcagatatgaagcggagctgctgccgcgaccgaccgcagcagctgccgcccgaccgccgggaggatggagttcagtgggcagcggagctgtctcagtctttgccgccgcgccggcgagcgccgcccgggaggcagcggctggaggagcggacgggcccacggggcccgagggcaaggagcagccgcctgccttggcctcccaaagtgccgagattgcagcctctgtccggccgccaccccgtctgggaagtgaggagtgtctctgcctggccgcccatcgtctgggatgtgaggagcccctctgcctggctgcccagtctggaaagtgaggagcgtctccgcccggccgccatcccatctaggaagtgaggagcgcctcttcccagccgccatcacatctaggaagtgaggagcgtctctgcccggccgcccatcgtctgagatgtggggagcgcctctgccccgccgccccatctgggatgtgaggagcgcctctgcccggccgagaccccgtctgggaggtgaggagcgtctctgcccggccgccccgtctgagaagtgaggagaccctctgcctggcaaccaccccgtctgagaagtgaggagcccctccgcctggcagctgccccgtctgagaagtgaggagcctctccgcccggcagccaccccatctgggaagtgaggagcgtctccgcccggcagccaccccgtccgggagggaggtgggggggggggtcagcccccggcccggccagccgccccatccgggagggaggtgggggggtcagccccctgcctggccagccgtgccgtccgggagggaggtgggggggtcagcccccccccggccagacgccccctccgggaggtgaggggcgcctctgcccggccgcccctactgggaagtgaggagccccacagcccggccagccaccccgtccgggagggagatgggggggtcagcccccccacccggccagccgccccgtctgggagggaggtgggggggtcagccccccgcctggccagccgccccgtccgggagggaggtgggggggtcagccctccgcccggccagccgccccgtctgggaggtgaggggcgcctctgcccagccgcccctactgggaagtgaggagcccctctgcccggccagctgccccgtccgggagggaggttggggggtcagccccccgcccggccagccgccctgtccgggagggaggtgggggtgtcggccccccgcccggccagccgccccgtccgggagggaggtgggggggtcggccccccgcccggccagccgccccgtccgggagggaggtgggggggggtcagcccccccgcccggccagccgccccgtccgggaggtgaggggcgcctctgcccggccgcccctactgggaagtgaggagccccacaccccggccagccaccccgtccaggagggaggtgggggtgtcagcccccgcccggccagccgccccgtccgggaaggaggtggggggggtcagcccccctgcccggccagccgccccgtccgggagggaggtggggggtcagccccccgcccggccagccgccccgtccgggagggaggtggaggggtgtcagcccccccgcccggccagctgccccgtccgggaggtgaggggcgcctctgcccggccgcccatactgggaagtgaggagcccctctgcccggccagccgccccgtccgggagggaggcggggggggtcagcccccctgcccggccagccgccccgtctgggaggtgaggggtgcctctgcccggccgcccctactgggaagtgaggagcccctctgcccggccagccgccccatccgggagggaggttggggggtcagccccccacccggccagccgccccatccgggaggtgaggggcgcctctgcccggccgcccctactgggaagtgaggagcccctctgcccggccagccgccccgtccgggagggaggtgggggtgtcagcccccgcccggccagccgccccgtccgggagggaggtgggggggtcggccccccgtccggccagccgccccgtccgggagggaggtggggggggtcagcccccctgcccggccagccgccccgtccgggaggtgaggggcgcctctgcccggccgcccctactgggaagtgaggagcccctctgcccggccagccgccccgtccgggagggaggtgggggtgtcagccccccgcccggccagccgccccgtccgggagggaggtgggggggggtcagcccccccgcccggccagccgccccgtccgggaggtgaggggcgcctctgcccggccgcccctactgggaagtgaggagccccacagcccggccagccaccccgtccaggagggaggtgggggtgtcagcccccgcccggccagccgccccgtccgggagggaggtggggggggtcagcccccctgcccggccagccgccccgtccgggagggaggtgggggggtcagccccccgcccggccagccgccccgtccgggagggaggtggaggggtgtcagcccccgcccggccagccgccccgtccgggagggaggtgggggggtgtcagcccccgcccggccagccgccccgtccgggaggtgaggggcgcctctgcccggccgcccctactgggaagtgaggagcccctctgcccggccacgaccccgtctgggaggtgtgcccaacagctcattgagaacgggccaggatgacaatggcggctttgtggaatagaaaggcgggaaaggtggggaaaagattgagaaatcggatggttgctgtgtctgtgtagaaagaagtagacatgggagacttttcattttgttctgcactaagaaaaattcctctgccttgggatcctgttgatctgtgaccttacccccaaccctgtgctctctgaaacatgtgctgtgtccactcagggttaaatggattaagggcggtgcaagatgtgctttgttaaacagatgcttgaaggcagcatgctcgttaagagtcatcaccaatccctaatctcaagtaatcagggacacaaacactgtggaaggccgcagggtcctctgcctaggaaaaccagagacctttgttcacttgtttatctactgaccttccctccactattgtcccatgaccctgccaaatccccctctgtgagatacacccaagaattatcaataaaaaaataaattaaaaaaaaaaaaaaagaaattatactgtcatatatggattcagccacaggttgaatggtgacaaatttctgaactcaactcacttgcacaatgaacccagccaatagaagatgtgttgactcttaggcttagggcaagaggcaaggttttgggtttctcacttgtttgaaggtcacaaaaaattatcaaactcactcatattgtataatgccctcacattgtacagagagtgtcattacataactcagcacaaagtggagattgtgactctcaaatgcacgcccagccaagaataagaattgtgatccacacacacagacagaacccactggtgaggtcttgaatctcactctcagatgagtccacagtttgaatttttaatgtcatgtgtggatccagccacaggtaagagggtgactcatttctgaacccatctaagagacacagtcatgattttcatacctggacccagccaatatgagaggtgttgactctcatacctggacttaggaaaagaggcaagatcatgagtttatacagcactaatgtctcagaggggattgtgactctcacccaaacaatgtaaagccctgtggagttaaagagagtgtcataagaggacccagaacacaactgaaattgtgattcttatatgcacttccagcccacagtaaaaagtgtcaccctcccacatgaatacagaccactgttgagcttctgaattgtacatctggatgcagttgaaaagtggaattctaattctcatttgtggattttgtccacaggtagatgatgacactaggatcagggttcatcacaccggtgaggctttgattctgatagcaggacatggtctgcaggtggaattgggactcttatgcatggattcagtccatcattgagattgtgactcatgtacttgcatgcaatgcacaggaggtgttgactctcctacctgaagctgggacacgtgtggaattgtgcatcttagccctggaccttccacaagtgttgttgtgacatatacttttgcttagcacctgagtaattttactcccctgcctgggcccagccctcagaggggattgtgacagatacctgggtcaaacacctaggtgatgtgactctcatgcttgagccctacccacagagggtgctgtagaatatcactgggctcagcacttaggtcatgtgactcttattttcagccagggccctgcccacagagccattgtgagatatcactgagctcagcacctccgtgatgtgactgtacggcctgtgccctgcccacagtaggtattgtgacttacctctgaactcattacctaggtgatgtgactttcctcttttgcctgcattctgccccttgaaaatggactgtgacataccatttaggtgatatgattctattcttctgcctgagctctggccataggggagattgaatcattttactgagcccagattgcaagtgatgtgaccctctatcctaggccctgcccacaggaggtatcgtgatttatctctgtggccataatttaggtgctgtgactcttctattctctctaggccatgccagttgagggggattgtgacttttctattctctctaggtcatgccaattgagggggatttggaccagcacaaaggtaattaaaaactcctgcctaggccattctcatagaaggcattgtgacatatcactggtcacagcacacaggtaatttaactctccttcctgggccctgcccataggggatactgtaacatatctttagcccagcacttaaaatatgtgactctcaaatggtatttctagttctagatccctgaggaatcaccacactgacttccacaatggttgaactagtttacagtcccaccaacagtgtaaaagtgttcctatttctccatatcctctccagcacctgttgtttcctgactttttaatgatcgccattctaactggtgtgagatggtatctcattgtggttttgatttgcatttctctgatggccagtaaaggattataaatcatgctgctataaagacacatgcacacgtatgtttattgtggcactattcacaatagcaaagacttggaaccaacccaaatgtccaacaatgatagactggattaagaaaatgtggcacatacacaccatggaatactatgcagccattaaaaatgatgagttcatgtcctttgtagggacatggatgaagctggaaacatcattctcagcaaactatcgcaaggacaaaaaaccaaacactgcatgttctcactcataggtgggaattgaacaatgagaacacatggacacaggaaggggaacatcacacaccggggactgttgtggggtgggaggatgggggagggatagcattagaagatacacctaatgctaaatgacgagttaatgggtgcagcacaccaacatggcacatgtatacatatgtaacaaacctgcacattgtgcacatgtaccctaaaacttaaagtataataataataataaaaaaaatgtgactctcctagctggtttcttttccacaggtgagaatttcacatataactgcacccagcacacaggtgaaattgtgacttttgtatgctcatccagccaacagttatgagtgtcattgtctcatatggacagagaacactggtgaggtcctgaatcttgtacacggacatagtccacagttggaattttgactgtcatgtgtagatccagccacaggtgtgatgttgacctgtttatggagttagctcacaggcacagtgagaactctcatatcttgacccaaccaataaaagagatgttgactcttatagctaggcttaaggaaaccaatagggtcctgggtctcctacctgtatgaaagtcacagaagattatgacactcatgcatattgtataaatccctctgggtggtacagagattcattatagggcccagcacacaggtgagattgtgactttgttatgcagacaccgctgacagtaccatcaccctcccatataaacagagcccactggtgaggtcctaaatttcacaaactgacacagttcacagttgggattgtgactgtgatatttaaatctgatcacagatgagaagatgactcacttctggatccagcttagaaaacagtgatggctctttcacctggactcagctaaatggagagatgttgactctgttaactaggtttaggggagcacataatgttctgggtctcctgcttgcataagggtagcagaggattatgacactatacatattgtacaaagtcccccattggtcctgagagggtcattacagggtctggcacacaggtgagactgtgactctgatatgcacacaggcagagtaaggattgtcagcctcctacatggacacagcccactgttgagattctgaatctcacaaccagaagcagtcaaaagttggaattgtgactctcataggtggatgtggtccacagctgagatgatgacctcagaccaggaggcagcacacctggaggctgtgactcctctaccgagatgcagtctgcgggtgtgattgtggctgtcatgcacaaatccagtccacctttgagactgtgactcacttactgagacccaattcacaggaggagttcactctgatacatagagctgggacatgtgtgggattgtaaatcttatcacttaacctttctgcaggtgtgattgtgatatatagctttgcccagcacctgagtaatttaactctcttgtctgagcctggcatacagttaggatcttaacatatacctgggccaagcacctaggtagtgtgacttttttttgggccctgccctcagggataattgttacttatcactaagttcagaacctagtgatgtgacatttctctactgtcttggccctacccacaaaacaaaattacatcactgggcccagcacctaggtaatgtgcctctactctttttcctgggccctgttcatggtgggccttgtgtcacatacatgagccctgctggaaagcatgatgatgattctcatacataaacccagccaaaagatgtgattttttactcacatagtgaggcatagggcaacaaataaggtcttgtgtcccttacttgtacaaaggtcacagaacattataagcccaccgatatgtcatatagtcctaagagagtacagagagtgctgatacaaggcccacttgaagatgagattgtgactctcctatgcacacctcactgaccattagaatcaccacattcaaacatggagagagcccactggtgacctaaattttacatgccgatgcagtctgcagttagagttgtaactgtcatatatgcatttggccacaggtaggatggtgattcattattggacccagctcacaggcatgatgatgaatcttgtatctggaatcagcaaaaaaaaaaaaagatatattaattcacatagctaggcttagggcaaatggtaaggtcctggttcccctacttgtacgaaggtcacagaggattactacacatgcttataatataaaggccttgggtggcacagagagtgtcacagcaggacccagcacacaggtgagattgtggctctcttaaacacacccagccagcagttaggattgtcaccctcaaacaggaacagagcctactggtgaggtctagaatctaaagtggaaacacggtccacagttggaattatgaatgtcatatgtggatctggccacaagttaggtgttgacacatttttgaacccagctcacagtcacagggatgactctcatacctggacccagacaacagaagatatgttgactctcaggcttagggcaatgggtaagatcatgagcttatatcagcactaaggtcttacaggaaatttcaattcttatgcatcctgcataaagccctggggtggtatagattgtgtcataacagggctcaggacaagtgggattgagacccttgtatgcacacgcacccaagagtaagaactgtcaccctctcacatggacacagcccactgttgaggctctgaatcttacattcaggggtattcagaagttggaattgtgattctcataggtggatttgattcacaggtaggttggtgacgggtaggatagttaggattgtatcttcaggccaaaatttatcacacctatgaggcagtgactgaccccactgaaacactgtccagagttggggttggctttctcaggcactgatccagtccatggttaaaaatgtgattcacattcttgaacacaactcacaggagttgactctcatacctcaagctgggacaagtgcgagattgtaaatcttatatctggaccttcccacagggtgattgttacatgtatctttgtcagagaactgatgaattttgctgtcctgcagaagcccattctatagttgagattttgacatacaccttggccaagtaccaagaatatgtgatgctcctgcctgggcgctgccctcaagggggattgtgacatatctccgggccatatgttgtaggttatgtgcctctccaatcctgcttaggctgttcccaaaaaaggcattgcgacatgcctgaacccatcacctaggtgatttgactcttttttttcccctgggccctgccctcagtggggattgtgacatatcactgggtccatcatttccgtgatatgacttttgtgttctgctttgactctgcttgcaggaggattgtgacatataactaggcccagcacctgggtgatgtgactctcatttcctgcctgtattcttccacagaatagattgtgacatatagctgggccaagcacccaggtgatgtgactcctgcgtacagtggccatttttgacacatcttcctgggtcctgtttatgagtggaattgtgacatatctttggccaagcaccaaagtgatgtgactgtctgatttctgctcacaggagctattgtgacatatatctaggccaagtttagaggtgtgtgtaatgatagccctcctatatggacccagtcaataggggagatttggcttctgttttctaggcttagggcaatggataaggttctgggtgaaaaagcataaagttctgggtgaggaaaggtcacaaaagattatgacactcaagcatattctctaaagcccttgtgtgacatttagagtttagttacaggatccagtacccaggtgaaattattactctcgtaggcaaacccagctgacaattaggattgtcaccctcacacatggacagagtccactggtgaggtcctgaatcttacaggcacagtccacaattggatttgtgcctttcatatgtgtcctgggatagctgatatggtgacttatttttggaggtggcttacaagcactgtgatgactgtcataaatatatctgaccaataagagagatgttgacacatacctggtaatagatcattggttcataccagcatgaaggtctcaaagcagattgtgactgttactcacaccatataaagcccttggttagtacagagtgtgtcataacaggtcccaggacacaggtgaaattgtgactttcttatgcacactcagccaacagtaaacattgtcaccctcccacatggaaaccgtccactgttgaggctgtgaacctcacatgtgcaggtagttgaaagttggaattttgactctcatgaatacatctggtccacaggtaagatagtgactcaaagaccaggattcagcatgcctgtgaggctgtgactcatatactgaaaaatttgtgtttagaattgtggctctcatgcaggcatacagtccgctattaagactgtgactcatgaacttatacccaactcacaggaggtcttgactctcatacctggagccagaaaatgtgtgaaagtttaaattttatatctggacctttttgctggtgtgattgtgacatatacctttgtccagcgcttgaattatttgaccctcctgctggggaaaagcccacaaatggaattgtgacatatacctgagcccatcatgtaagttattttactctcctgcataggtcttcaggggagattgtgatacatcactgggcccatcacctaggttaaatgattatcttcttttgcctgggccctgccaacaccaagagttgtggcatataactggacacatcacttaagtaatgtgactctacttttccacctgggccctgcctcagtgtgggttgtgatatatcactgagccctgcactcaaatgatatgactctcctgccttggcccttccaatatgaggcattgtgacatatcaggggcccatcaactaggtattatgactctccttttctgcttgggccctgtacacagggtggattgtgacatattactgtgccctgtacacaggtaatgtaacttttctgcctgaaccctgcccacaggtggcattgtgacatactattaggcccagttcccaggttatgtgattttactgccatggccctgcccagagagtggatattgacatttttttggtccagcattcaggtgatctgattatcttgcctcttcccttctcacaggttaaatttcaacctatgttttttttcccagctcacaggcattatgaccatgctcatatagaaaaccagccactaggagtgattttgactctgttagctagactttgagtagtgggtaaagtcctaagtctcctacatttagaaggataacagaagttgatgaaatgtatgcatattctataaatactttgagtaatacagacagtataataagggcccagcacatagtgagattgtgactctcataggcataccaagccaacaattagggtcatcacttccaaacatgaaagtagcacactggtgaggtcctgaacctcacatgcaggtgcagtccacagttaaaattctgattgtcatatgtggatctgagaacaggttgaatagtgactgatttccagactcagctcagaggcacagtgatgactcgcatacccggatctagccaatacgagatatgttgactctcataggtagccttaaagcaatgggtaaggttctgggccttctacttgtatgaaggtcacagaactcacgcatattgtacgaccccttgggtggtacagagaatgtcataacagatcccagcacaaacttaaaattgtgattcttataggcatacccagccaacggtgagggttgtccctcttacacatcaacagagaccactggtgaggtcctgcacatggcatgtggatgcagtccatggttcacattgtattgttcacacttgtccgtcactgggtgctgggttcatagtatatgcattttgtaaaaacttataaagctgttattttataatatatgtgctttttatgggtgtaaaattaaaaacataatttttgatttttctatttatctcatgtttcttccacaatcaatttttgtcacatactttcctggaaaatagataatttcatctaaattttcaagtttaatgtcatgacatttaaaaaaatattatgtttgaatcttgaatgtatatctaaatatcttcttttatcttttgtaaaatttttactcctcttgaaatagtttatctactttattattgcattcaaagaacagcactaattttattcacgttattatccctgagtaacaaatgagtcagagaagtcgagaaacttgcccaaggttacacaggtactctgagcctgctcttctaaccattgaacacacggtgtcatccaggaaacacacatgcaatactatttctaaaggtccataaaatcacatatacacatgcaaatatgtgtaaagataaaatgaacttatacagtgtttacctgcagaaaagtcactggttgaaagtgtagaaggtcacatagaagaagccttctctgtttttattgttttgttgttttgtagagataaggtcttgttatattgtctaggctgatctcaatttcctcggctaaagcagtcctcctgcttcagactcccaaagtgctctctgccatatttttaaaagtacttattgggtcaagtgtgctggctcatgcctgtaatcacaacattttgggaggccagggggaaaagattgtttgagttcaggagtttaagacaagcctgggcaacatagtgagacctcatctctactaaaaatagaaaaatatagctaggcacggtggctcacacctgtgatgtcatcactttgtaaggctttttcttccatgattaaaaacaaatcttggtatctggcagccgggcacagccaggtaaggtgaggacaggaggcagaaacttgcaatccatgggctacattggctttttgatttttttttctccccaactacacagaaaatttcttcagtgtttgatcttatgcatctttgaatccaaacatctcattctttgccttatacatattaaaatgtattcacagttcataaacataatctataaaaaatattctaaacaaaaaccttctctttatagaacctagtaatgcaccttaattccttacaatttgtgttaagaattactagtctaatgatgttttctaacatgtattaagtacttttagatgtttagcacatgtgatatattataaaaacctcaaaattaacctgggactccaaagaatatgtatggcccaaacagttgttttcttcccaacaccaaggaatggcatacaaggctgtcttcaagttgaggacaggtcataaagacaaataaaaaaaagagaaaaaaatgtctgcaaacttgtttctacacatgggtcttacatgcatttctccatcaattatattaattctgaatgaactaaattacctgaagtggtacaaataattccttcaaattgtagaatccccaggaaacagaaagaagcaaaagcaaactctcccaaagaaagtcacatctattctggaccttgatgaaacttgcaaacaattttccattatgtgcaatgactagcaagcaatcaaatatgacaaagttcacaataaataacatcatgtgaaagacaccagagaaaaacataacagaaacaaatctgcaaagacatccaatattagaattatcagacacaaagaataaaaaacaactatgcttaccatatctaaaaaagacaaatgaaagtatctgcaggaaagaagaaactatataaagattctaaaaatgagttgtaaaatgaataatacagtaactaaaaaactcactacatttgaacttatgtgtacaagacagaaccagtaaactagatgctagatcagtagaaattaacacatatgctacaaatatcagtctcagaaaaatgtctggtaagtattccaagcattcaaaatttaaaactgaaaagcatgaggttgatagtacttaacctttctcaaaaatagaataggtaaaaacactgcacaactcaattcctgagtttatgtcaaagcttgacagagacaaaacaaggacaactataaacaatctcattcacaaagacaaattttttttttgagactgtgtctcactctgttgcccaggctggagtgcaatggcccaatctcagctcactgcaacctccacctcctgggttcaagcaattctcctgcctcaccctcctgagtagctgggattacaggcacatgccagcatgcccggctaatttttgtatttttagtagagacacggttttaccatgttggtcagtctggtctcaacctcctgacctcatgatctgccagccttggcctcccaaagtgctgggattacaggcatgaaccaccgcacccagccaagacaaaaattttttaaaccaattacaaataaagtgactctttctctgtataaaatgaataaaaccaacaataagtttatcttaagagtacaggataagttgaacattgtataatctacatgtctacataaaataggcacacaataagagcttggtaacataactagaaaaaaagaatgctttattttctaaatatacaaggtatttgaagtaaagtacagcaaatgtacataataaactactgaaatcttgtctttcaatgtcataaacaataattatgctggtattcaagatttttattaaacattgcatccatggtttcagccaacaggttaaaatgagaaatcagttacacaattatactggcaaagcggaactagtcaataaactaatagctaacctattggttctacctaggtagattggatccttacaaagcaactaacacaaaaattgtccatatatattgaggatttaaaacttctaggagaggcccggcggggtggctcatgcctgtaattctagcactttgggaagccgaggtggcagatcatgaggtggggagttcgagaacagcctggtcaatatggtgaaaccctgtctctactaataatacaaaaattagccgggagtagtggtgcacgccttgggaggctgaagcagaagaatcgcttgaacctgggtggtggaggttgaagtgagccgagatcactccactgcattccagcctgggtgacagagcgagactctgtctcaaaaacacaaaacaaaacagaacacaaaataaaacttctaggagaacatgaagaagaatattgttattataactgtggggaaaaaaacttcttagacattgcacaatataaaaattatgcataggctgggagtggtggcttgtgcctgtaatcccagcattctttgaggcccaggcaggcagatcacttcaagccgggagttccagaccagccagaccaacatagtaaaaccccatctcaatttaaaacacaaaaatcagcagggtgtgctgcgcatgtttgttatcccagctattcaggaggctgaggcatgaggagcacttgaacccaggaggcaaagattgcagtgagctgagattgcaccattgcactccaccctgggtgatagagtgagactttatctaaaaaaaaaaaaaaaaaccattaaaatatttgtgaattagactataccaattttaagaatttttgattaccaaaaacataaaacatgttttaataaagatggtgaaaagccaaaccataactgggggaaaatagtttaaaaacacatagtacaaaaaattagtatttagaaaatatatattacagaatgtgtatgaataaacaaggaaatggaaaacattaaaaataggacagatggcaagtcttaaagcactaactgatgaaaaatgctaacttcattagtaactatggaataaaagtataaataatgtgtttctaattaaccattttgtcaaaaaattatgtctagcaattccaagagttggtaaaagatatgtactagtaataagtgtagatacatcaaatgaaaaatggtaattgagaatgtcactttcaatgtttgagtatttggacttttggtttaaaaaagtgtaataaaatagagcttttggtaagctttctgtagcttaacattatcataattaggaaaaaacaactttaaaaatgtaaataaacaaaaaagcctacaccaaaataaaacaacaactaagacatattgatccttgttttgggagagtatgaaacagaccattgtgtgaactttatacagttattttgccacactggcatagtaataaaaattatttatattcaatttgaatgaacatgtccacatcttaaaaatactgctttgtactatgaataataaatgtaaaagtctttatactcaagaggatcctgattctcaactaaacatatatggcaacccgttcctctgtttcttcaaaactgaagcctgattaaggcttaaacatggagtgagagggattcataacagaacatgtgaaacaaaaaaacatgagataggatggtcatttctaagaatcagcaattgcctgggggacctcaatataatgatatcaaatatgaatcttactggataaaaataaacacaaaaagctgaaaacaccatgactttaatttggtggaatagagtctctggaattatgcagagttgtgctaaaaatattgagccagaatgatatgtatctaaggattattaaagggaatatttacaaacacattagtatttgttctatatcttgttagagtagcagtactcttgtctgtaatgtcagcttccccaagctacagatgccattgacaaactaagcaagtgtctaaaatgttgtttggagttagtttctaaatttaagaaacttccaataattttatgaatttcattgaactctgtttcatgtataaatctcaccaaaaggcactattcggtacctatttccattagtcttttctgggattttctgttgcttgtttccaaaccaaccttatttgaatcctagtcatttctaaagccccacatgtaataatagaaagagagcagaaatgaagccaagttatcccaaacagtccatgcctaatatattttgttccccaaatgaaccaaaaaccacacaagctacacaacagtggatttaaaattcaacctaaattcaacagtagttgtcaaaatcatatgcaaaaattagcaaagtcacaatgtagaaacccttaacctgttattccacaacaaatcatcaaattcttattttggcatttttagaaaaaataattacattacatatgacaaaatatacccactcacttataataaaatattttgaaatacatacggttttattcttattcttgaatatatattatttagacaagactttcagtaaaaaatacttatagctaccgtgtatgaattaaaacagctatgggaagataggatttttagttaataatgaagattgaagctccaatgatgtaaagtattgtttcctgggcacacagctaattacccaaatcaagctgaaatatgcttgatttaaaaattttaattttcccactgttgacaatattgacataacagctaaatcttagtctcagagctggtagtttggaataaattaagacaagtactattgaggaaggatgggtagtcaagaaagtgactatgtctttgggatgcagcaaacatggccactgtacagtggctgcatattgccaacacaataagccccagcattcacattgtattccagcttattcaagcaaagctctctccaatagagaaaatcccctgtaaagagcatgaagattttgattttacctttcctcaaactgacattttactcattgtaatagtaaaaagcaaacctgtgagtggagatttaagatgctagtgagatgtgaaaaatgaacaagcatgtacagctactgtgtccgtgcatcaagagggccatccagaacatgcttactaataacaccactttccacctctttataaataattatataagactcccataaaaaagtccctagtttcagtctttgctttctcattcttgtaagcaacccaccctgaatcctttctctctcaaggtgtactgggtattctgcacctaacttttaaaatagtcttactcctttgcaataaattactctatgctgcatcttctttgttgtttgtctcttgtttaaatttttttgaagctaagacaactgaggtttcataaaagccattaaacactatcatgctttgttttgtattttttattgtcaaaaattttttctctgatatgtcaatattcacattttaaacacagtcaacactgctaaattgaaaatttaaatgaccacaaaataatttatcataaaagcatgtatatctctcatgtttcaccttcaccacactttctatctattcaactttttaaaaaatttgacggtcaaatacatacatcaaatttaatattttatttaataatatgaattcaattccaaaatgatttatatggaagtatattgttatatttacttttgaccaaatttggctttccaaactaaggtaaaactaaagcatattttcaaagttttaaggaacttaaccttactagcattgagagaagctagctagcatgccttaggtagatagcaagggaagggtttatggagagctcccaacccacaggttagtgccttatccccacataacataaaaatcagcttggaaaaaaaaaataagctccaggcactattaagggaactagcatagggggttgtgcctagactcatgccctcggatgcacaagtaggagaacctaaagcccatttagataaaaatttgcacacacctctggcttacttagaagggaacaaggcctgacatagaaatgtctttgctgtttgtataatcagtgggatcccagaaaaaagttttttctttttattgtgggcgtgaacgcagtgggctttgatgggttctgtggacactttcttttctgtgagtctggtctttataaattattacttcagcccttgattggtcatgggcaaaggtcttaggccaagctctggcttcagcttctaataggttctgggccaacctgagcagcctttatgaatcattacttcagcccctgattggtcccaggccaaggccccaggccaagctgagtcacacattctctaagacagctcataaactaagcacaattttttcccattccagtttataaaaaccctggatcccagccttatagtgggcaacccattgaggcctccctctctgctggagtagggctttcttctctttgcacattaaacttttgctccaacctcacccttgtgtccacattcctaaatcttcttgaatgtagcacaaagaattctgggtattatctcaaacaacagaggttgttacaccttggttcattggcaaaactacaacatattttggtgtgttggccagggagaaaggaattcatcagaagggtgattaggagtgaggctacttgtcctcagttactttctgaggcttcttgtcctaagtttctttttctcaaaaacagctttgaaaacattggctctgttctaatccagtttcctttaatgaagggcctactcattgtgtggaattgaaaggaggtcctagggcaactgaaggttcctggctgagtctatacttcagtgttacctaaaaacccttggactaactccagtccccaacagccaatgagggcgttggcatgagaacttctagtcttttttttcatttcattttcttcttcttttttttgtggctatcatttctcctatccattctttgtatgcaatgttgtgaacgtttttacagcctatggatataatcatactgagtaaagtcagtcagtgtcttagtaatcagatatgtaactcagagttgttgttttgtaatttcctatcaacagggagatttcaaagtctctctctaaatttttacttagtaagggcctttctgtcccccagtaataaacattcatggcactgtatgagagaatatttcaccctgagtaaataccctcctttgcatttggtttgttttttttctctccatgtgaacctcagcattgtccaaggaatctaaacagttcctttatgagacaagttcattttttgttctggagcatatgctataggaacagcctatcaaaccacaaaagtctttctaacttttgcctaaaaatataaagttggagtttttacctagcatttctaattttacagcacccctagttgaatgggattgttctccatgggaagatttgtcaacgctctgtccaaaacttacagttccccaattattttcccttttacatgcctttatcagtgataaggcctcatgccctatttgtaaacagaagaactcaacttctgacagacggaagaaagccatgctaacaaaacaaatcttcaatttttacacatttttaaggcacctgttcctcctcaaactacatttgaatttaaacagaaaaggaattttatgtttgaaagtaaattggtcccattctctgggattctgatcttcctggggccatagcaaaggaagccaaaaatggtattagggcattccctctataaaagtatcttgcccaaatgcaactactgcgtaatctctccccagccattggagtaccttgagagccttttgggctgagtgggcctagaaaaccagcagcatggaaagctaggtgagaaggtgagcataacgtgtcctgctgacaaactcctccggacccatgggggaaggtcatgcttgcatccatgggtaacatctatgatggttgctgggacccagaggaaaaaaaggaaggtcgagaagtggtatgccctttttctatttccttccaccataggccacactgaaaagagaaaggggactgaggaacgccttgtctctcctctttctctagataggtaacaaaccatgtagagtctgcattcccctctagtgcattctgaaacactggaacttcgttaaccctgaaactcgaaagaaaaaatggcttacattctattgcacaaatccatggccatcttagagacaggaggcctagctttctaagggaaacattaatttcaacactatccaacaaatagatatttctttgccctgtgagacaatccagatctttgtaagcattgtaaaattaaatctgccctcttggcagccatatcagacaaacctacaaaatataattaacaaaagtctagatacaaacccttggggaaccctcaaatgcaacttctgggtgctctactggcctcccatattttgggccaccaacacccatgtatcatcagctcctctagttttgccactcaagaaacccacaacattgctgttgccccctacagaaaatgcccagtagacatggtgttactaggattcaagttcccttctcattgcaggaccttaagaaaataaagtgagccccaggaaagttctctaatgaccctgatacatacatagaggctttccaaaatttaacccaagtgtttaatgttacatggagagatgctatgctgcttttaagccaaaccctaactgttaagaaacaagcagcctaacaggcagcaaaaaaactcaaaaacaaacagtaggtttcctatagccagtcagaaaagaaactcagtcaaaagggaaaaaaagtgacagaatccccattcgcagtaagaataacaacaatgccccttaaatatcctaattggagcccttgtgatcctacagagaagtggaaaagaagacactttccgatgtgcatattagaaagcttgcaaagaaccacaatcaatcatgttaattactctaacctgtccctgttaaatcagaaaccagataaaaatcccatggactttttgaaaaggctgagaaaaactttagtaaaacacacctccctgtgttctgattcaataaaaaaggtttattacttaggcagacactaatatcagaaagaagttgctaaaacaggccctgttcaaacatctttctaggttttgtcatccacaagttgaaactttgctgtatttaaacaacactgttttctgtgccccaactgaggaggtctcaggaggcactaaggctttcatcaattttttagctgaaagggaatataggctttcaaaatttaaagctcagctctgtcaaactgcagtaaagtagataggtctagtcagaaggtaccagaacaccaggtaaagaaataattaaactcattttctccttttcctttcccaaaactcttaaatagttggggggatcttagacattactggtttttgagaactctgggtacctgggaatggtgaaatagctaatcttttataccatcttattaaaaaaactgaagcacctaaaaacttactcgctaacttgggaagctaaaactaaaaggcctttaactaactaaaggcagccttacttaaagtgccaaacctcagtcttcccataaggaaggcatttaatctctatgtatcaaaaatgaaatgaatgaccctgggagttttaactaaggttcaaggtccagctaaacaaccagtgggttacctaagcaagaaacctgatttgatggctagaggatggccagcgtgcctctgagcagttttggtggtggcttgcttgtaccaaaggccatgaggttaacaatgggaaataacttaactgtctgcattcccacattggactgctgtcctctaaggaaaacctctggctaataatcacctcctcaaatatcaagttttgctgctaaagtgatctgcagtccagttgaaaatgtgcccttgcctgaaccctgacattttctcctaggggaaactaaagagcctaaacaggattgtaaacaggtagtggtgtaaactggtaaaggaaataataagaatcactgtttatattctctgtgaagttttaattaattaaaaaaaccttttttaaagtgcactcaccttaatgaaaagttaatatccaacctacaagtatattcaaaaagcctttctatttttatctttataaaacctgttttcttggaagaggaattttttctcactcaactaaatttattttctccacttttacttgtcactgttgatgcaagcatagaaggccctaaaataacctctggtggcctgggactcctcaagaaaacaaaaaagccatgacaaattgcattttaaaagaaatatctgctttttttttcatgaaacccctagaattaaaagtaaataagtccctctcaaaatatgtctttttcttctaggtatgcttgcttattaggccctggaaactgtattcctagccctgttctttttttttgtttttactggggacagagtctcactctgtcacctaggccagaggtgcaatggtgcaatcttggctcactgcaacctccgcctcctgggttcaagcaattctcctgcctcagtctccctagtagcttggattacaggcacctgccaccatgcccagctaatttttttgtatttttagtagagacggggtttcaccatgttggccaggctggtctcaaactcctgacctcaggtgatccacccacctcagactcccaaagtgctgggattacaggcataaccactgtgcctggcccctagccctgttcataaaggtcctcaaccggagaccaataatccaattagaaaattggcaaacaaaaaatcttatagttactgaatcttcttctgttagtctagatggttatatacatgttttgtgtgatgtctataaaaaaaaacctctaattaattggcctacaaataagcacttagataaaatattaagacaaaattaaagtctctagtgcttcttggttcacgcaactttaagaaataaaaacattcttgtagaatacaaatatcttacaaatgtaaataggtggtctaaattatgcaggccaaatagcaggtttgctaaatgttttaatgttgtaaactgcttccttggcctttaagaactgtcaaccggccagcttcacaaatagtaaggcctggtgacatataaaactaaccatgcccctaactatactggaagaagtcagactttatctgttcctagcacataattaaaacaacttaccaggttttacattaaagttaaaattacataaagttaccattataacatgtattgagactactaaaaatggatttgcaggcaatgtgtgtaaaaacggtaaaattttttaataaaaaattacaagaaggcataaaaatctacatttttcctaggaataaaagattgtcttaaattaaataaagtgaaagttttaagcaaatttttaaaataccataaaaattaattttgcaaaagaaaacctctgtgtaaacatattagctaaattcaaaggaataccatatggtttttctttcaattaagcatttaaatgaaagcacagcaaagttttctaaagatgctaatctgctctatatcaaaatttctaaaagattatataaaagatttgtaaaaaatcagagatccattccaagatggctgaataggaagagatctggtctgcagctcccagcgtgatcgaggcagaagacgggtgatttctgcatttccaactgaggtacatggctcatctcattgggacttgttggacagtgggtgcagcccacagagggcgagccaaagcagggcaaggcattgcctcacccaggaagcacaagagattggggaattttcctttcctagctaggggaagccgggacagactgtacttggaaaaatgggacactctcgcccaaatactatgcttttcccaaggtcttagcaaccagcagacaaggagattctctcccgtgcctggctcagtgggtcccacgcccaaagagccttgcccgctgctagcacagcagtctgagatcaaacaatgaggtggcagcctggttgggggaggtgtgtctgccactactgaggcttgagtagctaaacaaagtggccaggaagctcgaactgggcagagcccactacagctcagcaaggcctactgcctctgtagactccacttttgtgggcagggcatagttgaacaaaaggcagcagacagcttctgcagacttaaacatccctgtctgacagctctgaagacagcagtggttctccaagcatggcatttgagctctgagaatggacagactgcctcttcaagttgatccctgacacctgtatagcctaactgggagacacttcctagtaggggctgacagacaccacatataggtgggtgcccctctgggatgaagcttccagaggaaagatcaagcagcagtatttgctcttctgcaataattgccattctgcagcctccactggtgatacccaggaaaatagtgtctggagtggacctccagcaacttgcaacaggcctgcagctgagggacctgactgttagaaagaaaactaacaaacagaaagaaatagaagcaacatcaacaaaaaggacatccacaccaaaaccccacctgtaggtcaccaacatcaaagaccaaaggtagataaaaccacaaagatggggagaaaccagagcagaaaagctgaaaattctaaaaaccggggcatcttttctcctccaaaggatcacagctcctcaccagcaatggaacaaagttgaatggagaatgactttgatgagttgacagaagttaggcttctgaaggtcggtagtaacaaacttctctgagctaaaggagcatgttcaaacccattgcaaagaagctaaaaaccttgaaaaaaggggagatgaatggctaactagaataaacggtgaagagaagatcttaaatgacctgatggagctgaaaaccatggcacgacaacttcgtgatgcatgcacaagcttcaatagccaatttgatcaagtggaagaaagggtatcagtgattgaagatcaaattaatgacataaagtgagaagacaaagttagagaaaaaaagagtaaaaagaaatgaacaaagcctccaagaaatatgggactatgtgaaaagaccaaatctacatttgatagatgtacctaaaagtgatggggagaatggaaccaagttggaaagcactcttcaggatattatccaggagaacttccccaacctaccaaggcaggccaacattcaaattcaggaaatatagagaacaccacaaagatactccttgagaagagcaaccccaagacacataatagtcagattcaccaaggttgaaatgaggaaaaaatgtaaagggtagccaaagagaaaggtcaggttacctacaaagggaagcacatcagactaacagtggatttctcggcagaaatcctacaagccagaagagagtgggggccaatattcaacaatcttaaaggaaagatttttcaacccagaatttcatatccagccaaactaagcttcataagtgaaggagaaataaaatcctttacagacaagcaaatgctgagagattttgtcaccaccaggcctgccctaaaagagctcctgaaggaagcactaaaaatggaaagaaacaactggtatcagccactgcaaaaacatgtcaaattgtaaagaccaccaatgctatgaagaaaccctcaattaacaggcaaaataaccagctaacatcataatgacaggatcaaattcacacataataatattaaccttaaatgtaaatgggctaaatgctccaattaaaagacacagactggcaaactggatacagagtcaagacccatctgtgtgctgtattcaggagacccatcttacatgcaaagacacagacaggctcagaataaagggatggaggaagatctaccaagcaaatggaaaggaaaaaaagcaggggttgcaatcctagtctctgataaaacagactttaaaccaacaaagatcaaaagagacaaagaaagccattacataatggtaaagggatcaatgcaacaagaagagctaactatcctaaatatatatgcacccaatacaggagcacccagattcataaagcaagtcaccagagacctacaaagagacttagactcccacacaataataatgggagactttaacaccgtactgtcaatatcagacagatcaacgagacagaaagctaacaagtatatccaggacttgaacttagctctgcagcaagcagacctaatagacatctacagaactatccaccccaaatcaacagaatatacattcttctcagcaccaccttgcacttattctaaaattgaccacataattggaaataaagcactcctcagcaaatgtaaaagaacagaaatcacaacaaactatctctcagaccacagtgcaatcaaattagacctcaggattaagaaactcactcaaaaccacacaacatggaaactgaacaacctgctcctgaatgactactaggtaaataacaaaacaaagccagaaataaagattttctttgaaaccaatgagaacaaagacacaacataccagaatctctgggacatatttaaagcagtgtgtagagggaaatttatagcactatatgcccacagagaaagcaggaaagatctaaaattgacatcctacaatcaaaattaaaagaactagagaagcaagagcaagcaaattcaaaaactagcagaaggcaagaaataactaagatcagagcagaacagaaagagatagagacacaaaaaacccttcaaaaaatcagtgaatccaggagctgtgttttgaagacatcaataaaattgataaaccactagcaagactaataaagaaaaaaagagagaagaatcaaatagacgcaataaaaaatgattaaggggatatcaccacctatcccacagaaatataaactaccatcagagaatattataaatgcctctaagcaaataaactagaaatatagaagaaatggatgaattcctggacacatacaccctcccaagactaaaccaggaagaagttgaatctctgaatagaccaataacaggatctgaaattgaggcaataattaacagcctatcaaccaaaaaaagtccaggaccagatggattcacagcagaattctaccagaggtacaaagaggagatgataccattccttctgaaactattccaatcaatagaaaaagagggaagcctccctaactcattgtatgaggccagcatcatcctgataccaaagcttggcagagacacaacaaaaaaagagaattttagaacaatatctgtgataaacattgatgtgaaaatcctcaataaaatactggcaaacccaatccagcagcacattgaaaagcttatccaccataatcaagtcagcttcatccctgggatgcaaggctggttcaatatacacaaatcaataaatgtaatccatcacataaacagaaacaatgacaaaaaccacatgattatgtcaacagatgcagcaaaggcctccaacaaaattcaacagcccctcatgctaaaaactctcaataaagtaggtattgatggaatgtttctcaaaataataagagctatttatgacaaacccacagccagtatcatactgaatgggcaaaaactggaagcattccctttgaaaactggcacaaggcaggaatgccctctctcaccactcctattcaataaagtgttgaacgttctggccaggtcaatcaggcaagagaaagaaataaagtgtattcaattaggaaaagaggaagtcaaattgcccctgtttgcagatgacatgattgtatatttagaaaaccccattgtctcagcccaaaatctccttaagctgataagcaacttcagcaaattctcaggatacaaaatcaatgtgcaaaaatcacaagcattcctatacaccaccaacaaacaaacagaaagccaaatcatcagtgaactcccattcacaattgctacaaacagaataaaatattgaggaatacaactgcgagggaatgtgaaggacctcttcaaggagaactacaaaccactgctcaatgaaataaaagaagacacaaacaaatggaataacattccatgctcatggataggaagaatcaatatcgtgaaaatggccatactgcccaaggtaatttatagattcaatgccatcccaatcaagctaccattgactttcttcacagaattgaaaaaaactacttcaaagttcacatggaaccaaaaaagagcccatattgccaagacaatcctaaccaaaaagaacaaagctggaggcatcacactacctgacttcaaactatacttcaaggctacaataaccaaaacagcatggtactggtatcagacagatatattgaccaatggaccagaacagaggcctcagaaataacgccacacatctacaatcatctgatctttgacaaacctgacaaaaacaagaaatggggaaaggattccttatttaataaatggtgctgggaaaactggctagccatatgtagacagctgaaactggatcccttccttatactttatacaaaaattaattcaagatggattaaagacttaaatgttagaaataaaaccataaaaaccctagaggaaaaccaaggcaataccattcaggacataggcatggccaaggacttcacgactaaaacaccaaaagcaatggcagcaaaagccaaaatagacaaatgggatctaataaactaaagagcttctgcacagcaaaagaaactgtcatcagagtgaaaaggcaacctacagaatgggagaaaattttcgcaatctacccatctgacaaagggctaacatctagaatctacaaagaactcaaacaaatttacaagaaaaaagcaaacaaccccatctgaaagtgggcaaaggatatgaacagacacctctcaaaagaagacatttatgcagccaacagacacatgaaaaaatgctcatcatcacttgtcatcagagaaatgcaaatcgaaaccacaatgagataccatctcatgccaattagaatggtgatcattaaaaagtcaggaaacaacaggtgctggagaggatgtggagaaataggaacacttttacattgttggggggactgtaaactagttcaaccattgtggaagtcagtgtggcgattcctcagggatctagaactagaaataccttttgacccagccatcccattactgggtatacacccaaaggattataaatcatgctactataaagacacgtgcatacatatgtttattgcagcactattcacaatagcaaagacttggaagcaacctaaatgtccatcaatgatagactggattaagaaaatgtggcacataacacaccatggaacactatgcagccgtaaaaaaggatgagtccatgtcctttgcagggacatggatgaagctggaaaccataattctcagcaaactatcacaaagacagaaaaccaaacacagcatgttctcactcataggtgggaatttaacaatgagaacacttggacacagggtggggaacatcacacactggggcctgttggggggtagggccctgggggagagagagcattaggagaaatagctaatgtaaatgattagttgataggtgcagcaaaccaacatggcacatgtacatctatgtatcaaacctgcatgttgtgtacatgtaccctaaagtataataataataattaaaaagatttgtaaaaatctcatttcatggtcaaactggttaagattaaatagaattgtctataatttcattaaaattgcagttaacattaatagtcaactaatgcaagggtaaaatttggctttctctttttaacaggatttttatgtaatagtaagggctaataaaaggtttttgctttttcaaatttttaattcttcatgttggttaaacaaataacttatgataatctaaaattctattctgtaagattaactgttttatacctgtaacatatttaacgagctccccaaaatcaaacttctgtttcaaggttgtcttttctgagtcctggctttttggtgctacaaagagtccctaaagcattcaaaagaatggcaaacagaattatttaatatgtttaggaacatgggattgtcaaaatgatgtctaatttttttcagtttatatttgagtatataatattaacatatgttccaaaaccagctacgcatggtggctcacgcctgtaatcccagcactttgggaggctgaggcgggcagatcacctgaggtcaggagttcgagaccagcctgaccaacatggagaaaccctgtctctactaaaaataaagaattagctgggtgtggtgacacatgcctgtaatcccagctactcgggaagctgaggcaggagaatcgcttgaacccaggaggcggagattgcggtgagccaagatcacgccattgcactccagcctgggcaacaagagtgaaactccctctaaaaaaaaaaaaaaaaaaatgttccaaaaccatatggggtgtctaaggttctaatgtctaaatatgtgctatcaatcaaaattaagtttgttatgttgggttattgtaaactacaaagataaccaaatttttttgtccatcatgtttctaactgtaaccctggacattttgtcattggcagacaattttcttgttttaatcctcttaaaaaatgatttataatcagctgtggaactttaacaggtgctctcaaacacagatttctgataacataaaagtacagaactcataaaaagctaaaatgtttatggatatcaagcagaaccaagttaatagaatggatttagctaatagaaaactaaagcaatgtttttaactttcacttaaaacattgctaatttttattttgtttttcagagtcagaaaaactttcttaaaagttttaaaaaccgagcaaggtgtactgctgtaaacataatttggaccatgtctgtttctctttgccttgttctcctaaaaatcaaaaactagttataagtattcttaacttaaaacaatatagttgtttgcatcagtgaaacaaaaattcattttctttttttctgagacatagtctcattctgtctgtggctgatgtgcagtgccacaatctcagctcactgcaaccttgcctcccgggttcaagtgagtctcctgcctcagcctcctgagtagctgggactacaggcatgcaacaccacagccagctaatttttgtatttttagtagagatgggatttcaccatggtggccaggatggtctcaatctcttgacctcgtgatcttcccacctcagcacagccagctaatttttgtatttttagtagagatggggtttcaccatgttggccaggatggtctcaatctcttgacctcgtgatcttcccacctcaacctcccagagtgctgggattacaggcatgagccaccgtgcccagctgaaaaatccactttcttatgcaatgaaacacaatagaaaaatgctagttgttttaccaaggctttaatggaagggtatgttttttttgtttttttgtttttttaagaaatcaagtttaagttgcaaagccaaacctcttgggaaagctggtctcatacctgtagtctacacagtcttcatacagaattcctggcctgtggtgagtaaaaaatgtcactttctaacaggctcagaaacactatgatcttggaacctcaaaaatacaggagtttactcaactcacaggtatttaagggtacaaatccatggcttggcccagctttaaaaagtcttatctaagatttcttttggaacagagtttcatcaaagcctatcaaaaaggcctatgtagaggtagttattcttgctgcactgtgatcagtcaggccaagtataatactaaagtttattttgcaaacaattcagtctattttgagttgtttttaacaaaataaaatctaaaaaaaaaaattatctttcaaaacttaccatacatttctcatgaacttctagtctcattgattgttttagagtttttgatgacgttttaaactaacactgcttattcctgtaaaccaaccagcaatctctgcctgcagctcagaaaacagaaagggatgggtcatgtaaaaatctaaatcaatattctagttctaagcaattattctgcaaatcctgctgggtgatgaaaataaataaggtgccaataacccagatgcttcttttatcagaaagtaagatcaagggagctaaccaaagccaaacctcatgcacccaaatcttagcaaacataactatagctaccaggtatcagggtgtgtcagcagcctcaacatttttaggcttttcctactccccttgtttcatttcaatgcatgttctctactaaaccagattgtttcttttttcctaaaaactgtcgagctccaagtggtaatgcaaatggaatgatgcatatacacacgtttcttccaaggacccttaaaccaaccctggaagaaatcctagctgctgttttctacacagcacccctctccagtgaggaatagccaaaaatatcaatgcctattttccctaacagcagttagggtctccactcctgaggggggactgagagggattagctagctagcctaaggtagatagcaagggaagggtctccagagagtccccaacccatgagtcagtaaccacatacccaccaagccgggcattatggcacactcctgtaatcccagtgactcaggaggctgaggcatgagaattgcttgaacctgggaggtggaggttgcagtgaactgagatcataccatttcattccagcctgggcaacagagggagactcagtctcaagaaaaaaaaaaaaaacctcatcttttatcaatattttaatagttttatgtctgagcacttaagcttcaaggacaggacactgaatgatgataagtgcatatttaaatttataaagtaaaagatgaccatcagagtctaataagtgatgaatacagcaacatcatacttcacaaaatcattccgggtatgtttgacaaacaagaaggttgcataggaccttcttgtgctattcatgtgaagtgctcttctctctcactttagtctcaattcccaaccttacagctaccacatactcacatacacagaataagaaaaattaacttattttcttagaaagctgtgattcacattttattctattacatcttttccacattgctgttacaatactgttgaagtgcaccttctttcaccagaagaatacttttgtgaacgtgaatagactgacactggagaagaccagctcagcaaactcacttgaacgatccctttgcttttcaggcagtaaaaatgccttcgaggagtgaaaataaagtgactgcggattaagcagacagttatacatggaaaaacatttgtcaattgtttgaagattacattgcatggtctacaacttttaaaatataaaatgcataacataaatactgcaaaagaaaatagaataaaaatgatgtagttgaccacaaaggacagcaaagctgtattatagcaatatagaaaaatatatatctggccgggcgcagtggctcacgcctgtaatcccagcactttgggaggccgaggcgggcggatcacaaggtcaggagattgagaccatcctggctaacacagtgaaaccccatctctactaaaaatacaaaaaattagccggcgaggtggcgggcgcctgtagtcccagctactcaggagggtgaggcaggagaatggcgtgaaccccgggggcggagcctgcagtgagccgagatcgcggcactgcactccagcctgggcgacagcgagactccgtctcaaagaaaaaaaaaaaaaagaaaagaaaaatatatatctactgccagaaggtaacttgaagtatttgagagatgttctctaagaatctaacaatatttttagttttagattctgtaaaaaatttaagcatttttaattttcaaaaaaatttgagtgcattttttgtcagcttagttttcctgaagaatttaaatataatagagtaaaataatacatattaaaaatgatttttctggtaatagagcagtttaatttttagattaaaaaagtaaaattttacaaaattatatgctgaccagtttaatcagaagcttctttcttacaactgggagaaatgacacaaagactcaacttttatgtcaggtgggagagaaaatgattactaggggctagaaaattgttgtttcactaatcaatgttgatttttattgctattttgtctcaaattatgttaataataaagtaatggccttgatccaaaaaaattttttaaaacttattttttcaatcagccaaaatattaaccaaaaggataaaggtatttaagtcataatttatagtataaaattaaaatgtttctagaaatataaaaggaaaaaagatatataaaaaataagaaaaggaaaaaagtggattactcacaatagctaaggtatgaaatcaacctaagtgtccatcaacaggtgaataatttttaaaaagtggtatatttacacaatggaatgctctttattccttaaaaagaaagaagtcttggaggtgggctcagcagtctgtgtcttagcaagccttgcagaaattctgatgcacactgaagtttgagcgtcactggaatggatagtgtccaaatgattgctgggtcaccccacctatcctgaatgtcaggaacatcctgagtgagaccagtcagtacattgtagctctttctccagccacaaccagaaagtctttgcttcccctttgccttccatgattgttagtttcctgaagcctctgcagctgtgcgaaactagaaaaagatgcacacccaaaagccccatttgaaacttctagacagaaagccaagcatttggagagtctctttgaacagttttaaacacaattgcggaaaagaaagcaactctactcagtgtgaagatgatgagaatgaagacctttatgatgatctacttccacttaataaatagtgactttagaatccttaacacagcactcagctaccaagccaatgaataagattttgcatcacagttgaaatctgttctccactccttttgtagatgttctgaattggttaccagaagccaattgtctcattattaagatggcttctaaactgattcatttttgtgatacataatgactgttagttgaggtctagttgtatggtaaaaaatgctgatgaagaatgttgtctacagagaggatagtcaactaaaattaactgtgagctatgctaaggagctatacttaattcgttcagactttatttggccaggtttttttttatatttcaaagaagaaaatttttttaaaaaagtctttatttgcaacaacattgatgaacctggaaaataagccagcaataagccagcacacacacaaaacaatagcaaattatctcacttctatgtagagtattaaaaaattcaaactcactccaggtgtgaagtggcggccttgtgtgtgatctttctgccctccccaagtttgcattttcgacattaaagtctactttttaattaaaagttttaaattggagaataaaaaaaattgatactcataaaagcaaagagtagaatgatgattgcctgaagctggaggtggaggagatgttggtcaaaagtaatgagtctttcctacatctcttaccttaacaaataagttattcttctctttttttaaatcaccagggaattgaatatttcctgaagaattaaaactgaaagaataatatatatttattaaagcaatgcaggttgtatactgaaatttcagaggcttagtaaaataatatatattctgctaaaatcaccatttcctttttttctgattaagaggacttttttatgacctttcagggattatgttttctttcactttctatctgcattctctttcttcagccaactgattaaaaaaagatgcagagaagatacattttcttctcatccacacatcacttccactttctattagtcaatgtgagtagagctgagaatagctgttttctagcatgacagcaatttctcagaaataaaaacactctgaaacaaaactataaatctttcatcaaaagttaatgtattttaagcaaaataagcatatgcatcaataataaaatgcttgtggtagaatcgatttattttgttgatttctattgagttcagataagatttgaccaaaagctagcaaatatagagcagaaaaaagaatattatctgaaatcagaatatggtaaatgaagttaatttgtcaatagaaataagaatattatgacctcatgctaatagtctcatctaaagttgtacaacaccaaatgctacgttttattatagactgtattttacataagtattcaatttatatcatcctctttcactatttcaatgccttctccactttgtatcagtggaaaacaggccagctacttccaagaaagcaggcaatgctcttcttactttaacaatgatgatgaagagcacttgtttcagtgatgctcccatgccaaaaactgttattttggcggaagtactagttttctatttttctctatatttattaataataaaattcttaaccaagaggaatttatctcattcaagttttaaggaattttgtttacatttaagtgtctctgactttcctggaatattgaaatttttatgaatctaagttgagtactataaataaacaatcttttactaaaatactttttgaagtggggtgatatttataaaaacttttcataacattgaagatatgttttaaccatgttcccagtaatcactctgaacatagaattttcaattttcactgagtcactcaggggaaattgatatctttacaaatgggcaaaaaaaaaaggtgctgagtggaggtgcaacacattgcacatcaatgcttttcacatgcaactattagggtcttaatttaattgaactgtcatttgcatagctagacacttactgaatctagtcatactattttttggcaactagtgccatgtttgtcacctattagttttatacacttatttgcttgactgaaaaaaataaatcttcttttaacttactctaaattgagagactagatttacattctggagctataatagaagttgaatgtttttaatactatttttggcaaattctcatatattcacatataaattttatgaaaagatagggagttgacaaaaagtaaaaaaattcaaatacgttaagcaattttgagatctattgcacagcagggtaactatagtaaactataaaatattgtatatttcaaaatagtaaattttaaatgtactaccacaaaaatgataggtaagcaagttcacagatatgttattaaactaattattccatattttataaatatactaaaacatcacatcgtagcccataaatttatgcatctgtgatttgtcaatcaaaaatactactactttttttatgagagtgaaataagctttaagatattgcaccagagaaaaatgtgtttgttcatcttaaaattttagaaagcgtatacatacatattttttatttcaaatggcttgctcatttactgatgtacgtaaacttttaatatcatgaacagtcagaacccagcactcagaaatagactgttgatttttagtgttcaaaataatataatactttaaaagacagactctaaagcaactgtttagagtaaaattctctttaaatttttaaataaaagatttccttcacttgttagaaaaaaattttaatgtttttaaactacattgaaatttatcaaattaacataaatttattagacaataaaaaacaatatgccttcttctaattataaaactgacagacactctgcatttaaccaaatactttggtacatggattttaacgatatctctaatgacttaaaagagccactagttttaatttagaagtatattaaatttttatattaaaatctaggattagcctattattacatagaaaatttgtggtctgcatgtacatcatcagttgagtggtctacagttttggagtttcagaaacactaatataagaatacttcttccgattgagtaatttaagttttctcagtgactaaaaaagattagaattactgatcactcacttacgatgtggttttaaatgttatttaatgaagatatataaagtttcttttaaaatcattttaacaacttatttcttttgctttttcacttttattagaaaataagtatgaaaatttatgttactacaaacccataaattttatttaaatctagacatagtgttaatcttcaaagatctgatatttaaaattttggataacctatttatacttagaagataaataactgctttccagtaaatctaatggggcaattttgactctcaattataagctattaaaatattaatactatcatctaggtggaaattttaggtatctgcatgctcaggttgtttagcatataaatcagaaactataaatgtttataaactataaataataaactaaaaatataaagtatcattttttctcagttttgaaatactgtcattatttctaggtgacattaacactcaattacagaggctgtgactgttgaaattagaaatgtcatggttgattcttctttacttgctgcctttttatttcacacaaacacagcagcacaagtaaggcaagaaaggccacgctttgactgcaaacacatcagtgcccttctagggagaataaatgtgtgagcatattcacttgaaattcatggcatcttttgttcaagtacagactttcatatggaaagtaaaaaagacaataatttcacagcaatagcataagaaaagtactctaaaaataccttctgacccattatttctatttttcacaagaatgattgtgatggaatgagcatttgcagcactgtggtcttaacctccactttctgtttaattatttttggaatacgaccataagacttttgtgcttttttttttttttagaaaaaatgttttatatttctaattcagtaatttagcataattttttgtctcacactttcaaaaatagttcattctgaaaaaaatgattaaaccactacttaccactttttccccaaaaagagtagagtaacaaatgaagtctataagtctagagtacatttaattcataaataataaaggtgtaatgtgttttagctgcacacttgaaaatgaaacactttttggactatagcccaagagttttcagagaggttagcttataacatgtgaggagacctggtatagaaacattcaccccacgccttaagaggtgaaaatttgtctttcactcttaatttcaactattaacccagagctggaaaaatagaacatttcattataccaaaaacattttgtttttattttatatctaaggggtacatgtgcagatttgtaaaacatgtatactatatgatgttgaggtttggacacttaattattccattgcccaagtagtatacatcatacctaaccagattttcaatgcttgtctcccttccttcctccttctctttagaattcccagtgtttcttgttttcatctttgtttccatgtgcacccaatttttagcgtccatgtatgagtgagaacatgtggcatttgtttttctgatgcattaatttgcttagaatggccttctgctgcattcatgttgctgcaaaagatgttacttcatgctcttctgttgctgcatagtattggaggttgtataagtacatcattttttcttaaccaataaaagattcatgggtaactggtttaattctgtttttactattgtgaatagtgttgcaattaacatgtgagtgctggtgtctctttgggaaaattattttttcggggcagatccccagtaatggggttaattggtcaaatggcaattgtatttttagttctttgagaagtttccaaactgctttgcacagggctgaatcaatttgcattcccatcaacagtgtagaaagatttccttttctccacaacttcaaatcttatcttgcttttaataacagtcattcttactggtgtgaaatggtattgcactgtcaccctgatttacatctttctgataattaggaatgttgagcaatttttatgtttattggtagctctgtcttcctttgagaagctagctatttatatcatttgcttttttattaaatgttttatagattcatatattaatcctttattttctgcagtttgcaaatattttatttcatactgtaggtcatctgtttactttgttggtagtttcttttactgtgcagaagctctttggctgaattagatgccattttcaatttttatttttgttgcactcatgttagatgttagtcataaattctttccagaggccaatattttctaagtgttctcccaagatttttgtagcttgaagacccacagataaagtctttaatctgttatttttttatatagaaaaaggtagttcagttttcttccacatacaactaaccagttttcccagtattatttactgaatagggagttaattccccttttatttctgttggctttgtaaaaataacctggttgtaaagtgtagcttagctcaggactctctcctatttcattggtctatatgtatatttttgtaccagaaccatgttatactggctactctgctgcaatcttggctcactgcaacctccacctcccaggttcaagtagttctcttgcctcagcctcccaagcagctgagattacaggcacgcaccaccacacctggctaattttttgtatttagtagacactggtttcaccgtgttggccaggctggtgtcaaacttctgacctcaggtgatccatccaccttagcctcccaaagatgacaggtgtgagccatcacgctcgacacagatttattcttttagtctgaagcagtcttggctatttgagctctttaattctcttgtatatattttggaatattttctttttctaattctataaaaaagcatcatagatagtctgataaaaatagcacttaatccgtaggttgctttaggcagaatgaccattttaactatattatttgaatccatgagcatccagtatttttccatttatttgcattctctctcatttctttcagcaatgttttgtagttctctgtagagatattttacccccttgatttaatgtatttctaggtatttttttttgtggctattgtaaatagagctgttttttattttgttctcagtttattggtgtacagaaattctatgcatttgggttgattttgtattctgagatttttttgaagtctttaggcttaggagtctttcggtgaaatctttaaagtattcttggtagagaattatatcatcagtaaagataatttgacttcgttttctattcagattccttttatttctctggctacgactccataactatgttcagtaggactgtttagaatggatattcttatttttattcttatggagaatgcatccagtttttgttttagtatcatgttggctaaggatttgtcacagatgacattattttgaggtatgtttcatcagtgtctagtgtattgataatatttttgtcaatattgcattttcttggatgctttttctgcacctattgtgttaaatatttttttcttttaattatctttacatggtgaatcacactaattgacttgcctatgatgaaacacctttgtttttatggaataaagctcacgtgattgtagcaaaataacttggatttgcttttgaattcagtttgctagaatttcatggattattgttccaatgttcacccagaatattgacctgtagtttcctttttttgttatgtcttcactagattttagtttcatatatttcactgatttcatataattagttagattgaaatgccaccttgattttttggaatacattcagtaggattaggaccagcttatctttgtatatgtagtaaaacttggctgtgatttcatatgatccagggctttttatggttagtagttttattattacttgttcaaggtcactatacattttacatttttgctctgttaaagacttctgttattttctgtcaatattgggaagttttgtgtatctgggagtttgttttctctaaattttctactttgcatgcatgttcatagaagtctctgaggatatttttaaatctatgtagaattagatgtgatttctcatctctaacatttaaataaatgcagaataagagtttaacaaaattcaacatttcttcataaatttctgaaaaaagtaggtataggacaaataaacctcaagccaataaatgtcacatataacacacatataaaaagcacagctaataacatactaaacagggaaatcttgtaagcttttactctaagagcaagaagacaaaaatgcccacttttttcagtcttattagacatagtatgaactatccaagacagaaaaattagtaagtaaaatcaaagcactgagattagaaaaaatgttaaattattcctgtgtaatttttcatttctatacacaattttaagtaaacaaaagcctattactaaaaattagtaggactaataaacaaatttattaaacttgcagaatacaaaagcaacatccaagtgtccatagaatttctatacattgacaactatctttaaatgaaattaaagaaatacacaattggaaaaatattactttcataagttggcattaatattgttaaacatctgtattatacaaaattatgtacagctataatgcaacctctaccaaaataccagagacataactgacaaatttttaaaaatatatctaaaatttacaggataccagaaaaggccctgaatagccaaagcaaccaagcaatagaaaaagtgaaggtatcactctaccggactgaactgaaatatactaaaaagctatagtaaacaaacaaacaaacaaaaaagtatggtacttgaataaaaacagacacacaggcaagtagagaagaaaaaggagaccagaaatatcttgatgtttatattgatgtatttacagccatctgatttttaaataaaggtggcaatttcttagggaaaaggcagtatcttcaataaatggtgttgagaaaactttatatccacatgtagaggaatataataagaccctcaactcacaccatatataaacaaattagatacttaaaataaaaacacaaaataaattagatacttaaatgtaaggtctaaaactctgaaactactataaaaaacatagactgaaagccctgtaacattggttgggcagtcacttttagaatttgacctcaaatcccaaggagcaaattgaaaaaatagatgaatcagattattttaaatttaaaaactgctgcacggaatataatacaatcaacaggatgaggcaactaaaaaatggaagaaaatatttgcaaatcataaatgtgacaagggattaatatcaaaaccatataacaaactcaaatgactatacaataaaaaacaaatattaaaaatgagaaaaaggcttaaatatttttcagaaaaacacatacatatgaccaacagatatattttaaaaatgctcaatgtaaattattatcaggaaaggcaagcaaaaaaagaactatgagatatcaactcacttctgttagaatgactctaattaagaagaaaaagtgttggtagaattctgaagaaaagaaaatgcttgcacactatttgtttgaatgtaagtgaggacagccattatgaaaaatagagttttcttaaaaaacttaaaaatagaactaccatatgacaattgcaccactgtatatccaaaacaaaggaaattagaatgaagaaacatttgcacttctaggttgttcgcagcactcttcacacgtaaaatacataaaatcaacagttcaacatctaatgagtaaataaagacaatgtggtagatatacacaatggaataatattcatctttaaacaacaaaaattctattattttcaatcacatggattaccctagaggacattttattagttgaaataagcaaggcacagaaagattaaatgtctcatgagttcacttacacatggattctgaaaaagttaatctcatcgatgtagagagtaaaatggtgaccaccaaatgccaaggtatttagaagaaatgggggcattgaaagatgtctgtcaaggaatacataattatacttggataaaagaaataatttcaagagatttattgtacagcatggtgactatagttcataatgtatttgtatttttgaaaaatgcttacaatttcatgtggtctaaccacaaaaatgttaacaagataaagcattaattacctagaactaagcatttgataatgtatatatacttcaaaatgttaacaaaagaaatacacattttatttgtcaagttaaaaatatatttttaagacactatagaaggataacaatgtttcaaatactgtctgtctctttgctgttttctcatttgtcagtcataaccataggaactttgatgtttaacagcatgttctgaacccagcacagtgcatgggagaagccaataactttagggcttttattttaagcttggggcacttggagttactggtgcttatggtgatagtatgaaagacacgaaaacggaaggcttgcttatgctcccatgactggccactgtgtgatcacagtaaactggtttgcatgcaaactaacaggaaatgttttaatccaaaagctgccattatctccaaaagttttcagagaaaacctaggagatcgctagttaggtgactaagaatataaactgtagactaaacttcaaccactaaaacattaaaaaaagagtgataaatgtctccaaatcgtaatatcaatatggaaaataaatattattccaaatgtacagaggtcattttattgctttgcaacctttaacattcacactttaaaacagaggattttgcatggaaatgtaagttgtgctgtaagtacatcctaaataaattttaaattgctcacttactattctcttaaaaatttaatttttatgtttgttctagcaaattacatatttgccacactttgtataaaaacctaacatttttcttttacaaagaaacaccatgctgatttaatcctctcttcggtaggcagtgtatgtcttttatgttaattagccaatcttaaagttgtattcgtatgcaaaccttccagttaaaaccaatgtttcagtacatgaaaaaataccaatgctctccttaaaacctacaacataccttgtgaatcacatggcatgaaaacaacagtgagaaaactgtagccataccacagaaaaagaaggactgtgatgcatatatggtttgaatgcacataaaaagacaaaacttagataattaggacatgaatgaagcatttctctttaaattcagcaagattcagctttgcagcctggaaaaaatgttctcttcacatgaagaatcaatgttatgtctttgcaattgatattttccatctctgacttgaagttataaactaactttagcaggaatgtttatgacaaaatatggagcatctgttacacactgagcactgtcatgtttgtttgctatatttatatataaaagcatccacatgacttatgaagcttccctagtacttactgaaacaaattgactcaataaataaaatttacttatgtcacttataaaaagggaacaataacttaagaaaagtaagcttatatagggttctcccatagaagctaatggaatgttttaactaaataaaatgtaacaatacacaaattgtggaattatatctaaaaataattttgtgtgcatgatgaaattttataaaaaatattcttataactcaaatcagctcagataaatatttcataaactataaaacaaaaaaataagaaacaaaaagattgtgggtctaggccgggtgtggtggctcacgcctgtaatcccagcactttgggaggctgagatgggtggatcacctgaggtcaggagtttgagaccaacctggccaacatagtgaaaccccatctctactaaaaatgcaaaaattagctgggtgtggtggcacatgcctgtaatcccagttactcaggaggctgaggcaggagaattgcttgagcccaggaggcggaggttgcagtgagccgagaccacgctattgcacttgagcctgggcaacaagaacgaaacttggtctaaaaaaaaaaaaagattatgggtctagcatgagtatcatgcaagtaaaaaaagaaaattttcatggaaagattctaaatgataagctgttagatagtgtaataaactgaatacaaagcagagtatatacatttgcttttagcatttttgaggatttttgttttctagtaaattagacatcttattaaaatgctttgttttgtttcaatattgctcttttcttctgaaaacagttacaaacttatattcaaacacccttactccttaaacctgttatatctttagactaatagatgtgtatatttaactctatgtaagtcaaaactaaaactctattgtgtgctctcaggcagaggccacgtgttcaaaaaatacataaaaaatttttgaaaattattcaggactcagaaatatatgattttatttacgcttgtatataatttttatgatgaccataaaaataaccatgtagccaataataatttaactgtacaacttagaataactaagactgtagaattgaattgtttgtaatacaaaacataaaagccagaggttatagctaccttatttatcacaatgtgatcattatataatgtatgactgtattaaaatacgccatatatgacataaatatatacacatattatgtaaacacaaaaactaagaaaaataaatttaaatgtaaaaaaatttaacctacaggaaccatattctttaacttatttgtagtttaaagccactaaaaaagaagaatactagagatgttagtctattatgttaccaaatagtgtattgtaaccatcttttaaatatacccttgagtaaggtggaataggttaaaactagtggcataataacactttattgaatgtataacagtatttaacattataaatgttgaattgaaaaattaacacaatccaaaactttaaaaaaaagtggttttatcacataaaagtacaattagtaaaatgacatactaattattttgatttaattttaactataagaatgattttctctcataataacgcattagaatattacttagggctgggcacagtagctcacacctataatcacagcactttgagaagccaaggcaggcagatcacttgaggtcaagagttcaagaacagcctggccaacatggtgaaaccttgttttactaaaatagaaatattagctggatgtggtcaggggcaactgtaatctcagctacttgggaggtggagacaggagcatagcttgaacctgggaggaggagcttatagtgagccgagattatgccactgcactccagcctgggcaacagagtgagattccctctcaaaaaaaaaaaaaaaaaaaaaaaaaaaagaatattactcggaatgccctacatcactcaattctgtaagttaaccacaaacagcctttccacttaaattttcatcatgcatcttacatttcaatgtccttagtcatccataaggtaataaataacgaccgcctaataaagtctcccaaatctttgatgcagaattgatcacattttttttacatgtgaatacaacagaaatgaaaaaaaggcgtgaagtaatttaagagttgaattccatcattattcagtttccaaataagctgttttttttttcttttgagacagagtcttgctctgtcacccaggctgcaatgcagtagcagcatctcagcttactgcaacctctggctcccaggttcaagtgattctcatgcctcagcctcccaagtagccgggactacagatgtacaccaccatgcttcgctaattttttttatttccttttagtagacatggggtttcaccaagttggccaggctggtcttgaactcaggtgatctacccacctcggcatcccaaagtgttggccttacagatgtaagccactgtgtctgacaaaaaaaaatctgtattttcaagacaaaagtgtactttaaatgaaattataactcttcaaagatctacttcttttaaagttacatacaaataatttttctttttaccaactttagttttggattttttcctatactcagcaatctgattaagtgtaatgtctgaagtttgagacagatatttctactgtgaattctctgatatttacttaattttggattaaaattttttaatatttacttcatctgcaaacatatattttagtataaactttcgtgttttataatctgtagtttttgaaaaaatgtttttccaaattcattaaatttgcagggttattcttcaatataaattccctgatgttgagcaaagttggaacaactacctcagggttttcctgtagtacaaaatgtgtacaataaaacctgtgatacacgtaaaggtactacaactctctttatatttataatgtgtttcctcaaaataaatattcttctgtactttaagggcttatattttctgaaagatctattgacagcaactgcacttttaatgcttttatttagtatgaactctctgatgctgaataagatgtgagaagatattaatgacattcacattttttcccctagacagtctccctctgttgcccaggctagtgtaaatgctttcctttgcaattaggcatgagcattggttaaatgttttgccacattgtttattctagtagttttctccagtatgagatatcttacctacaatcaagtgtgacagccatttaaaggctttgtcacattcttcacatttctaggatttctcaccagtatgatttcttttatattcagaaaagtttcaggtgttgccaaaagccttgtcacatctttcaggtttgcagtttctctctagtatgaattagcttatgtctgttaagaattgaggatctgttagaggctttcccacattcttcacacgtgtatggtttctctccagtatgagttgtcttgtacgtagtaagccttaaggactgattaaaggctttgccacattccacacaattgtaggaattccctccagtatgaattaccttatgtttagtaaggattgaggaacagttaaaaaatttgccacattcttcacatttgtagggtttccctcctgtataaatacccttatgttcagtaagggttaagaactaattgaaagctttgccacatttttcacatttgtagggtttttcctccagtatgaattctcttatgagtagtaaggtgtgaggattggttgaagtctttaccacattcttcacatttgtagaatttctttccagcatgaattttcttatgtttgttaaggactgagacccagctaaaggctttgccacattcttcacatttgtagggtttctctccagtatgaattctcttatgttcactaagtcttgaggaccagatgaaggctttgccacattcttcacatttgtattgtttctctccagtatgaattaccttatgtttagtaaggtttgcaaccttactgaaggctttgccacattcttcacatttgtagggtttctctccagtatgaattctcttatgttccataaggtttgaggaccacttaaaggctttgccacattcttcacatttgtagagtttctctccagcatgaattgccttatgtgtagtaaggcttgaggaccagctgaagactttgccacattcttcacatttgtagtgtttctctccagtatgaattactttatgtttagtaaggctcgaaaatgtagtaaaggctttgccacattcttcacatttgtagggtttctctccagtatgaattatcttatgtttagtaagtgttgaggaccacttaaaggttttgccacattcttcacatttgtaaggtttgtctccagcatgaattctcttgtgttcagtaaggcttgagggccagctgaaggctttgccacattcttcacatttgtagggtttctctccagtatgaattaccttatgtttagtaagggttgagaagttaccaaaggctttgccacattcttcacatttgcagggcttctctccagtatgaattctcttatgttccataaggtttgaggaccggttgaaagctttgccacattcttcacatttgtagggtttctctccagcatgaattgtcttatgtgcagtaagggttgaggccttactaaaggctttgccacattcttcacatttgtagggtttctctccagcatgacttctcttatgttcaataaggcttgaggaccgggtgaaggctttgccacattcttcacatttgtaatgtttctctccagtatgaattaccttatgcttagtaaggattgagaacttactaaaggctttgccacattcttcacatttgcagggtttctctccagtatgaattctcttataagtaagggctgaggaccagttaaaggctttgccatgttcttcacttttgtaggaattctctctagtataaattcttttatgttgagataggtgtgaaagcatgcaaaatgatctgacatattctttacatttcaaaagtttctttccagtatgccttatcttatgtctttttgaatttgaacatttatgaaagatgtttgcatatttgccacattgaaatactttgctttgtgtagttgtcaaactctggttaagcttattataaccttttttgtgcaccttacactcatccacattggtacaaccaatttttaactgtaaattctcatgtccacatttttcatatcttctcaatatcactttttggaaagaatcttctctgccctgctctggccaaaggtcttgagcaaaatgagaacatataactgaaaagaaataaaaataacaaattagtccacttattagataaatatagtttccaaatttaacctataaaattattcaaactacataagcaagatgacactgcagtatgacacaggccctaattcttcacagacatataaatgtaataaaagcatacagaccaaaatacatatgtagataatttatacatgagttaagtgtgtacagtgtctgaattaagcccaatgcaaagagccacatagaaaaaaagaaaagtttgttaaatttacccaatcaactctttctgctcctcaatattacctagtcccttcagaagtaaattgtcaacttctgtttttttttctaaaggcaagtaaaatattggcacatacaatttaatttctgtcttctatgggcctttccacacactggtttctgtctcccatgacataaagtgctgaaagatatggtggtatacttagaaatgacagtttgagtctgttgagaccaaagataaatacaatgcagcagagcactgcagtgctgcaaagagagaaaaggtgtaacaagtaactacttttcagaagaaacataaataatctcttttaactaaaggtaagcacaaaatttcagacaagacaaatctgaagatgtttgagagacccacataatctctagccaagaccattgttttctgactacaccaggacaaagctatattataaatttttaaatgtccaaatctcaaagattacaatctatacaaaatagggcaatataatcccatcaaaaatattataaaattttcagaaagaaaccattaaaaatgtatatactaattttaaagattgaataatactctgagtgaaataggaacacaaaagactatagaaaatcagaaaaatgaggataagaacaaaaatatctacattgtggtgataaaaaatacaaaaagaaataactgattctaaaattaagataaaataatgtaaaaataaaaaacaagatcaaaaagcaaattaggatacacacaaatacatttataacaaaaacatatttataatcacaatttgaacagttacagacaaaaagagaatcttaggagctgcaagataaaagtgatttgcaaacatagtcttatgagataaccagtgaattgtcaacaaaagatttacaggccagaagagaactgtgtgagatagtcaaagtcctaaaaaaaaaaaaaaaatagctatcaagtgagaataataccaaatcagcaaatctgtcctaatagaaaaaaaacctttcaaaataatcaaattcacaaaaagtatatcggcactgcatatgtcttccataggaaagatgctgaaagcagttcttaccactgaaaataacgtaacataaaaaaacaacacctagcgtttgagctctgctaagggtcagactgccacctcaagtgggtccctgacacccatgtctcctaattgggaggcacctcccagtagaagctgacagacacctcatacaggagagctctggctggcatctggcgggtggcctgtgggacgaagcttccagaggaatgaatgggcagcaatctttgctgttctgtagcctcagctggtgatacccaggaaaacagggtctggagtggacctccagcaagctccagcacatctgcagcagaggggcctgactgttaaaagaaaaactaacaaacagaaaggaacagaagcaacatctacaaaaaggatgtttactcagaaccccatctgaaggtcatcaacatcaaagaccaaaggtagataaatccataaagatggggagaagccagtgtaaaaaggctgaaaattccaaaaaccagaatgccttttctcctacaaaggatcacaactcctcaccagcaaacaaacaaaactgaacagagaatgagtttgacaaattgacagaagtagtcttcagaggtgggtgggtaataacaaactcctccgagctaaaggagcatgctctaacccaatgccaggaagctaagaaccttgaaaagaggttagacgaattgctaacaggaagaaccagtttagagaagaacataaatcacctgatggagatgaaaaacacagcatgagaacttcgtgatacatgcaaaagtatcaatagctgaatcgataaagtggaagaaaggatatcagagactgaagatcaacttaatgaaataaagcaagaagacaagattagagaaaaaaagaataaaaagaaatgaacaaagcctccaagaaatatgggactatgtgaaaagaccaaatctacatttgatcggggtacctgaaagtgatggggagaatggaaccaagttggaaaacactcttcaggatatcatccaggagaacatccccaacctagcaagacaggccaacattcaaagtcaggaaatacagagaacaccacaaagatactactcgagaagagcaaccccaagacacataattgtcagattcaccaaggttgaaatgaagaaaaaatgttgagggcagccagagagaaaggtcgagatacccaaatggaagcccatcagactaaaagtggatctctctgcagaaaccctacaagccagaagagactgggagccaatattcaacattcttaaagaaaggaatttcaacccagaatttaatatccagccaaactaagcttcataagtgaaggagaaataaaatcctttacagacaagcaaatgctgagattttgtcaccagcaggcctgccttacaagagctcctgaaggaagcactaaacatacaaaggaacgactggtaccagccactgcaaaaacataccaaattgtaaagaccatcaacactatgaagaaactgcatcaactaatgggcaaaataaccagctagcatcataatgacaggatgaaattcacacataacaacattaaccttaaatgtaaatgggctaaatgcccccaattaaaagacacagactagcaaattgaatagagtcaagatccatctaagtgctgtattcaagagacccatctcatgtgcaaagacatacatagactcaaaataaatggatagaggaatagttaccaagcaaatggaaagcaaaaaaaaaaaagaaacaaaaaaaaaaaaaacaggggttgcaatcctagtctctgataaaacagactttaaaccaacaaagatcaaaagagacaaagatgggcattacataatggtaaaggggtcaatgcaacaagaagagctaactatcctaaatatgtatgcacccaatacaggagcacctagaatcataaagcaagttcttagggatctacaaagagacttagattcccacactataatagtgggagactttaacaccccactgtcaatattagccccatcaatgagacagaacactaacaaggatattcaggatgtgaactcagctctggaccaagcagacctaacagacatctacagaactctttaccccaaatcaacagaatatacattcttctcaacaccacatcacacttattctaaaactgaccacataattggaagtaaaacactcctcagcaaatgtaaaagaatggaaatcgtaacagtctctcagaccacagtgcaatcaaattagaactcaggattaagaaactcacccaaaaccacacaacatggaaacggaacaacctgctcctgaatgactacagggtaaataacaaaatgaaagcagaaataaaaaagttctttgaaaccaatgagaacaaagacacaacataccagaatctctgggacacagacaaagcagtgcctagaggaaaattcacagcactaaatgcccacgagagaaagcaggaaagatctaaaatagacatgctaaaatcacaattaaaagaactggagaagcaagaacaaataaattcaaaccctagcagaagataacaaataactaagaacagagcagaacagaaggagagacagacacaaaatacccttcaaaaaaaaaaaaattcaatgaatccaggggctgattttttgaaaagatcaacaaatagataagactgctagccagtctaataaagaagaaaggagagaatcaaatagatgcaatcaaaaataataaaggggacatcagcactgattccacagaaatacaaactaccatcagagaatactataaacatctctaagcaaataaactagaaaatctagaagaaatgaataaattcctggacacatgcacccttccaagtctaaatcaggaagaagtcagatccctgaataggccaataacaagttctaaaatttaggcagtaattattagcccatcaataaaaaatgtccaggacctgatggattcacagctgaattctaccagaggtacaaagaagagctgatcctattctttctgaaactattccaaacaatacaaaaggagggaagcctccctaactttgtatcaggccagcatcatcctgatacaaaaacctggcagagacacaacaacaacagaaaaatttcagtccaatatccctgatgaacatggatgcaaaaatcctcaataaaatacttgcaaactgaatccagcagcacatcaaaaagcttatccaccacgatcaagttggcttcatccctgggatgcaaggctggttcaacatatgcaaatcaataaacgtaatccatcacataaacaggaaccaatgataaaaaccacatgattatctcaatagatgcagaaaaggccttcgacaaaattcaataccccttcatgctaaaaactctcaataaactaggtattgatggaacgtatctcaaaataataagagctatttatgacaaacccacagacaatgtcatactgaatggccaaaaaccagaagcactccctttgaaaaccggcacaagacaaggatgccctccctcaccactcccattcaacatagtattggaagttctggtgagggcaatcaggcaagaaaaagaaataaaaggtattcaaataggaaaagaggaagtcacactttctctatctgcagatgacatgatttagaaaaccccattgtctcagcccaaaatctctttaagctgataagcaacttcagcaaagtctcaggacacaaaatcaatgtgcaaaaatcacaagcattcctatacaccaataatagagagccaaatcatgactgagctcccattcacaattgctacaaagagaataaaatacctaggaatacaacttccaagggatgtgaaggacctcttcaaggagaactacaaaccactgctcaagaaaataagagaggacacaaacaaatggaagaacattacatgctcatggataggaagaatcaatattgtgaaaatggccatacggcccaaagtaatttatagattcaacactattccatcaagctaccattaactttctttacagattttgaaaaaactaaatttaatatggaaccaaaaaaaagctcatatagccaatcctaagcaaaaagaacaaagctggaggcatcatgctacctgacttgtagtatcgaactacactacaaggctacagtaacaaaaacagtacggtactggtatcaaaacagatatatagaccaatggaacagaacagaggcctcagaaataacaacacagatctacagccatctgatctttgagaaatctgaaaaaaacaagcaatggggaaacgattccctatttaataaatggtgttgaaaaaactggctagccatactcagaaaactgaactggaccccttccttataccttatataaaaattaactcaagatggattacagacttaaatgtaacaccccaaaccataaaaaccctagaagaaaacctagacaatgccattcaggacacaggcatgggcaaagacttcatgactaaatcaccaacagcaatggcagcaaaagccaaattgacaaacgggacctaattaaactaaagagcttctgcacagcaaaacaaactatcatcagagtgaacaggcaacctacaggatgggagaaaaattttgcaatctagccatctgacaaagggctaatatccaggatctataaagaacttaaacaaatttacaagaaaaaaaaaacaccccatcaaaaagtgggcaaaggatatgaacagatacttctcaaaaaaagacatttatgtggccaacaaacatgaaaaaaagctcatcatcactggtcattagagaaatgcaaatgaaaaccacaatgagtaccatttcatgccagttagaatggtgatcattaaaaagtcaggtaacaacagatgctggagaagatgtggagaagtaggaatgcttttacactgttggtgggagtgtaaattagttcagccattgtggaagacaatgtggtgattcctcaaggatctagaactagaaataccatttgatccagcaatcccattgctgggtatatacgctcaaaattataaatcattctactataaagacacatgcatgcatacgtttattgcagcactattcacaatagcaaagatttggaaccaacccaaatgcccatcagtaatagactggataaagaaaatgtggcacatatataccacggaatactatgcagccataaaaaaggatgagtccatgtcctttgcagagacatggataaagctggaaaccatcattctcagcaaagtaacacaagaacagaaaatcaaactagcatgttgtcactcataagtgggagttgaacaacgacaacacagggacacaggaaggggaacatcacacaccagggcctgtcggggagtgggaggctaggggatgaataacattaggagaaatacctaatgtagataacgggttgatgggtacagcaaaccaccatggcacgtgcatacctacgtaacaaacctgcacgttctgcacatgtgccccagaatttaaagtataataaaaaaaatcaaaacagaatattaacaaggaaacggactacttaaaggtggtataaaacaactatttctgacagaggtatagacagcactcctcaacatcgggatatacacccttctcaatagctcatacaacatatttcttgatagaccacctcttaggccaaaaaagaagtcttaccaaattttttaaaactgaaattttatgaattattttctatgactaaactcaaatgcaagtatacaataatagaaaaaaattgaaaaaaaaatatgccaggcatgggtggctcacgcctgtaatcccagcactttgggaggccgaggtgggtggatcacctgaggtcaggagatagagaccattctggccaacatagtgaaaccctgtctctactaaaatgtgaaaaactagccaggcttggtggcatgcacctgtagtcccagctactcaggaggctgaggcaaaggaatcgcttgaacccgggaggcagaggttgcagtgagccaagattgtgccgctacactccagcctggagatagagcgagactccatctcaaaaaaaaaaaaaaaaaaatacacacacacacacacacacacacacacacacacacacatatacacacacataggaatttaacaaaacactcaagcatgctcttatgcaaatgttgtaatagttaacattgtaaagatgttcatcctggtcaatgtaatctacaaatttaatgaaatgtttttcaaatttctcattgcatttttgaagaaatagaaacagtaaccccaaaagtatatagaatttcaaaagacaataaagttcccaacaatcttaaaataataataataataataaagcaatattgcaggcattaaagttcctgatttcaaaagacattccaagctacagaattaaaacaatctggtataaggatgaaaaattagactaatgaaatagaatgcaacacatatatatactttaacatgtatggtcatatgaggagtcatttacatagcaataattattactgtaagctaataggtaaaggcaatgcaaatttctgtcaccaaatcattcagtaaatataatctgaaatataaaaatactggaatatcactcagttttcaaaaagcagaaaatgttctaccaattataaagataaatcttgataacattatgcaaaatgaaatgagtcagctgcaaaaagacaaagattatatgagatatatagctataaagcatttacactcttagaagcagataaaaagaaaaaggtgccctatttgcttaacccccaacagcaagaaagtctgtcagtcatccatgacaaaaatgtcttaatgagagaaccaggcagcatggttaatatctgtaatgacagctacatggtacagtaaggttgaagaattgcttcaggccaaaattttaagaccaacctgggttatgcagtgagaccccatctcaaaaataagtgcctttaagagagctttgagatccagggaggcaattgtgaaactttgctaaagcccaagattgaggagcacccttttcagaaggcaagctttcattcaggtggcaaactacaggacccctgctcttgactacagaccagaaaatgtcccacccaacttggtcccactgaaaattttgaacttactctgtaatcatcccaaactcctcccagccacagtctgtgagaggtcttgggtcttccagaggcctggagagtgatacccatttagagcaatgctggcaggcctgcagaccttggtcccaatagcagttccaagactcagttccagcttcctaagccacagttcatggccagttctgcctatgtagaaatccacagtgacctcagaaatcctctctggtactcagtgaaagccatactaatccacatcctaatataaagcccaccatatgcagacctgactgcagaaacctgccctagcatctaccctactgagcaaagtcctgaaggatatttactctgtccaaaaataaaatgggaattacaactacccaagccccttgtaataagctaaccctagtgcagagccagcagccttgtgaccaagctacaaccccactctactacaaacccagagggcattctatcacgctggaggcccaacaaaagatttttaccctctgaaaccagtttataaaaactttaagaggtgtttgcgccttcaaattgagacaccaatggaaaagtatattgtgcccattgtcaatgcttctattttaacacagcacttgacgtatgtggaagaaaaattagtcaaaaaaattttaaagtcattgaaattgaagacaaataagtaaaacattgctgcttgtagatcatgcagtgttctctataaaaaaaaccataaacagtacattaaaaccttttaaaatacactcagtaaattagcaaaatataaaattaacatataagttatgattccatacacttaaactatctgataaaatagaggaagaaaacaatcttatttacaatagcactaaaataataaatatccgagaacaaatttaaccgaggagctgaaaaacttttcaagtgaaagatttatcaatgaaaaatgagagaacacaaataaattgaaatatattttgtctatcgattcaaagaataaatgttaaaatgccatattatccaaagtggtctctagattcaataaactctctatcaatattccagtggttttttttcacagtaatgaaaaatacaatcataaaatttacatgaaactacaagaaactgtgaatagccaaggaaatcttgaggaaaaagaaaaaagcaggacaacatactttataatttcaaactatatttcaagactatagtaataaaaacaggatgaaatgtacagaaaaatgaacaaaaaacacccaatgatacagaaaccactactctcacatatttcagagatgatggaaaaagagaacttaaaagatagtttaacatggagtaccttaaaattatggaaatatctgtgtccacaaaaacaaaaacaaaaaaactcagattgtgcactctcttgtatgccatgaacagtactttggctgtcactgtaaacttgaaggaagattactgaagggaaaaaataattcttagaaattttaaaagcataagacagaagatgccactgtgtgagagaaaattaaaaaataaaaataaaaattaggctttccagaaactatttcttttggaacacagcttcccatatcactttaaggactggctttctccttgactttggacctctcatccatgttgtctgtattcattctcacctacctggcggttctttcaccagctcatgtctcttcatattccagggctcttttccttgctccagaaaaatgatcaggtctggcttaggggcagcaatacctgttttattaaaaatgagtaacatgcatcttgctcatattctccaattaacaacttagtaatgtgctcagtaaagaggatgtgatagaatattctaatacatttatcccaaaatactaaattacaacagaaatttctaaatatttagaaaacactctaattttgtaagttcttaattttatcacctggtactactgaattaaaaattggtggtggaaattagattttaaggtgtgagcaccagtatttatgccagtaaaattttgaaattaccattaatctaaagtgaaggacagagatcagctcaagaatgtggttaagttaaggtcaagatgaaacatcttgaaatttttttctctatggaaaaatccctatgattttcttgaaaacagaaatctgaaagcataaattaccaaaaagaaattatacaaaagagaaatgatgttgggagccgaaaggctgagggttgtgaccaactcagcattccactggaggctatatgatcaaacagcaaactgtttatcatgaatgcagaatgtgggcgaattcgcttctgctcctgccgccacaaggtacactaaggacagtcaccccctggtgccatgcttcttgaggttatctactggaacatctgcagagtactgtttaaagaatacagtcatgcagggttgtactaagtcaagcagctgaccacaacctcccccttctccctatctcctttactcaataaatatgaagggctatagaagctcagggcccttgttcactagaagcaaagagccccctggtgccgtcttccaaatatactcttttgtctgcctttattcctgcattcatcctcctttgtccaggccaataaagtccacagcaaaatgaaacctatagtgtatactaggaattgcgtattaaagttattctcacccaggaagaccaggtttctgtagttctctaacatcacattcctatataaattctgctgtgcagtgtccaggcattgccactcctccagagagaattgtatggccacatcccgaaatgtcaacgatccctggaaaacacacacaaacacacatatttaccaagtggtcatgggcagaatttttaatttgactcaaggtaaaatggaaagagtaaaaagagctcattctgacttacaggagtgactgaaatcattcaataaaatagttttcaacacaacaatattctctaatgtattctctaactctgagaaaagaaagtggtataagatccataacatcagtgtatgtatagtatttttctagataataaagtataaacttgagggcataaacactaacatgtacaattttgagtgctatatttacatcaaacagaattaattgtgtgccaggcgtggtggctcatgcctgtaatcccagcactttgggaggccaaggcgggcagatcacctgaggtcgggagttttagaccagcctgaccaacatggagaaaccacgtctgtactaaaaatacaaaattagctgggtgtggtggtgtgtgcttgtaattctagctacttgggaggctgaggcaggagaatcgcttgaacccaggaggcggacgttgtggtgagccgagatcatgccattgccctccagcctgggcaacaagagcgaaactccatctcaaaaaaaaaaaaaaaaaaaaaaaaagaattaattgtttgtatttttcagatggaaaagacatagttgtgtatattgttcagatggaatagacatgttgagttagaaggtatcactcaaattttaatgtgtacaataagctggagatcccattaatgcagattattatttttttttttcagaacatcagggataaagtctgagttgctgaatttttaaaaagctcatcagtatgccaatggttttggcccaaaaagactattttgtcaaatacccagtaattgaatgagcctgtgtttttctcagtttttctggtttgtaaacaaagattctcatcttcatttcccaaaaacagacaaatgcaaaggaaacctaagaaagaagggcagctgccagattaaatgtgttggtttgttcacatcagctgcataaagatacttaacgatgaacagaaaaataattctatagtgaaaaaatgtgtcggagagcttatcaaccaagtgatttattaacatcaactacactagaacaaatttttataatgtcctgatgcacccagaaggatacagcattactactgagatattaccccccaaaaggtaaattatagtctgaatttaaccataaggaaacattagtttaatggaaagttcaagatacagatatctcccatgttctgtaatttttaatagtgattttaaatagtctttctttagcactgtagagagcagttatctcctataaatttttttagaatttcctgggtaataaatactatactgcttcaatgagtggtttcttaatcctgtactgcatagacataataaggaacacagacaaaacctcaacattacatgttctctgccttcactaaaaaccccaggttttccccaataggaattttgagtatctacaccttcccatgttcaacagccacaaagggacattttaaatattgcagattataaaatcatagtgagatttctgcacggcatataagaagccataatgtagagaaggctctggtatatagaaaaaaatatatttttcagagactttgactattgtaagaattttttaaagtagttaagacaaactcattagggaggaaaaacacaagtagagaagtacaggtttgcaagtactaaatgtatgtttcctggaggaagcagagtggacacagatcttgatctgagacacatttagctgaaaaaaaaaaaggtcatttttttctctttctcctccttttctaggattctttctcagataaaattctctggacaaattacacctgcatcttgagaagatgcctttaaaagagtcagcaccacaggtctacctgctgtcaccacatccacaggcagaaggaccaagacagaaaaactccacccaattctgtcctttatagcagaagagatgaagaaacaatgagtagctccagagataaaaatatgcttttctttattttgtcctcgggagccatcccctgacacaggcaacagcaatttctgccacagtaatggaaatatgggccacgctgtcctgcccctaccaaatccaaacagaacaggttcttggaccaccctttaatgcaaagatggaacttaactctcatgaatgtattatgaattcctcatacttgattctggcctcaccttagagtcacatgagccacttaattaaaacaacatggatgcttccacaagaacaataaacagaatccatggaaagggcacaagtaaaaagagttctgcaaaatggccaggtgatactatttagcggcctgggctgataaccccttaactaagactaagcatttcctctcaagctctaacgagcttataaatcacttggtaattttctccccactctatgaaatgtaattctgcaggtatggaaagggtccacaaatgggtcttttaaacaagtgcgctgtcagtaatgatgttgttcccactgggcttattattacccttaattagaaaaatgaggcacaacacagagtcccttacacccagcactcttgtcacaacacaaatacttctggtacaaatgaagacaaacattcttcatcctaaagtattatattctttgctgactaaagtttacagagaaaatagaaagcagcaatttctgagtaagtctgcatttggaaaacaacatgtgcacatgtactaatgtaatttttattaagcaggtattatgtgatgttacagagtgctgtgatagcacattatgtgatttaatcctaataacaccctgtgagttgatactaagtgttcagtaattccaacactttaaaggacccagcatttttatttctatttctgtttatctgtcactgattttttcaaaaaatgcatagaaaaggtaaatatagacagatgaaagggatacagatggaaagaatttaatgcaatttagataaatttttattgtgtttatatttactttcttgtgacttgtgaatcaactactagatctgcaggaacagaaaacagttgctaaataatgtttctgcaagcactggttttaataaaaaatttgaaaagatcctacaatacatactttatatttcccgttatctgcttttgggtttcagaaaatgttgagcaccagctctaaaaaggcaacaggattcatgactcaaaactctgatttcctgtaatcagttctgtgaggcaagactccggggtagagccagacataaataaggcctccaaaaagggtgaatatgaacagggctggggcagagcgtacagccaatgtacaattctgttctctatgccactggggggtattgtcagttctttttgttaaagcttacttaagtaaacttaaatctgagtttgtataattttaatcttttttatcactgtcctgtgaattttatattatatgctaataagcaattttaaaaatcccttaaggttttctagaataattttttagaagaaaaataagtattcttagcagggtaaaataaatacaaataacaatgacgactcttctaagttcagctgtagacatcagaagccacaatataaagtggcccaaataaagcccaagtttttgcacacagctatttattgtacccaccatatgatgtataattcaaccatatttccagttgctagtctagactaaaactgccaggatggtaggaaccatgactgcttcatctatttttcttttctttttccttttttttgagactgagtctcactttgttgcccaggctggagtgcaatggtgtgatctcggctcactgcagcctccgcttcccaggttcaagcgattctcctgcctcagcctcccaagtaaccaggactataggcatgagccaccacaccaggctaatttttgtatttttagtagagacgggatttcactatgttggccaggctggtctcgaactcctgacctcaggtgatccacccaccttggcttcccaaagtgctgggattacaggtatgagtcactgcaccccacctgcttcatctattttttttttatgactatatgaaatggaagcaattagtttatctgtttgagcccaattagtttatctgtctgagcctcgagacctcctgattttttacccgagtacagggaacttgaaaaactctcttctgggtaccaaccaaagatacttcttgtataaggggagaaacaaacacaagatgactcatttctctcacaatgggacagaagcagaatttgtcactcttatcagcctgacacaattctgttctggacattctcaaatgtctcaaagattcagaggtgattgtgagagggttccccatgaccctgggctgatggtccactgataagccaggcagagaagactcgggatgattctaaataaaaaatggaactgccttggttgaactcccaaacctgggtcatccatcctgatttgctagctgtcctgatttgctagctggtgggtaagtagaaggacaagaatactttactccagtatcacattttacaggtagatatagttgtggtcatggctctggatactttgtggccttaagatgcttgtttacacttagagattctgccatcagattctatttactccgggagcctctcacatacctgtggcagattaatgaagaagatgtgaaaaggtcaaaaagccacactctcaaaagaggaatttaaaatgtctatgttgatatctcacaatgcagaaaatgcctcctgttggttttctgtaaattctcaatccaaagtctggccctgccttgtaaatcccaggcagaggccagccagatcttatttgcagattctaggtgaaatcaacctcactctgcatttttgggtgttacagcaagtagagtgaaatcaaaggagagattccctcatagaggctgctctagaacattctaaataatattttaccttaaaaaagctgacacaacatgaacataagcagacagtttatttgggtcaagcttaaggattttaacttgagaccaaatattcaagttgcctggaatccacgctttcattagcagcacttacaagtggatttgcaaaggcaaaaaaaaaggaacagtgagtgagctgatacaaaattggttgcgagaaattcttatttatgtaaagaaataactttaataattaattggatatacattgttaaggttaaggatatggaatacagtgtccagtgtggaattattagtttaatttatagctacttgtggcaatagtgaacagtttcaagagatacatagctgaaaaaaagggagaaaaacatgattgtgctctcattttaatgcctctctgagtctgataactaaaaggacttgcattcctcagacaaaaactttttttttcttctcaattctcaagacctagatttagaatttggagctgcaaattcaggtcctgcatgggtaaaatagcagcaagtgttacctgaacatttgtgggcattttagcatgaggagggagggagaagtggattctcatgtctacaggtctgctcaatgcacatattttactctgattgggccccatggtcactgaatcagtttcaggtctgaggacacaagagtcactgaaagaggtaaaatggctaatatctgaccaatgaagtctgtagaaatctggtctagcctctctaaaagtgactctagacatgatagataccaagtaggcagacgcacaattccacctgcatatttaggggacagcatgcacttcacagcacaattgtgaactgactggaagccgaaaaggcccatctagagtaaagcttagttggcaccttatgtgtttacattatgtctggtaattctagacaggatttggaaaatataattaaaagcaaaattttcttcagccccagaggaactgcacagtaacagaacagaaagaaaactgttttattacacaattacatgtgaatgtgacatgcattacagtcaatttgctcaagagattgcaaagacagaaagacagtgaccataatcagtctacaagtagaatttacagcaccatgtcatacatagttcatcctaaattcatctggtagttgggaaggccatccatgtatgctaattggttataatcaatgacaaaataaacttttcacatcttcatgactggaggtagttttgcaacttgaaccccggtgcctgctgaaggtaggctttgactcttctacaaaaattgttgattcgggtgctatctttttggctctttacattttaaagcaataggtctctactccctgagcactgggcttgagtactcctgtttccctctcctggtggctagtgtactctcttgacccctaccatctgccactgaggcacagcccacagcacagggctcacagctggaaactcacatcttaggtgaaccccaattgccacagcagcactccagtgccacatcagacagtgaagcctgagcagcaggaggagagcttgcaggcctcctgggtagaattgcaccttcacaataatagaaaagggagcactgtttcagcctcagtttttatttataatggtggcatgaaaaaaatactgctgggttttggcatgagtccagatagagatagctctgagagttctcactgtgacagcccacgtctttcacagacaccatgggactaatagggtttctgaaacagacacacaatgcatttgagagaaaaacagctctcattctgagaaagattatattgaaagaaaaaagttaaaagtgtcttaagaaaaaactgagattggatataagattgatcaagtcagccagaaaatatctccctaagaagaatttctctccaaacacccaagtgcatagctactctcagcaagagaaacaggagcattattgaataaagggggcatattctcagcagaatttttttttttttttgagatggagtttcaatcttgttgcctaggctggagtgcaatggcgtgatcttggctcactgcaacctctgcctcctgggttcaagtgattctcctgtctgagcctcacaaatagctgggactataggcacgcgccaccacacccagctaattttgtattttctgtagagacaaggtttcactatgttgtccaggctggtctcagactcctgacctcaggtgatccacccaccttggcctcccaaaatcctgggattagaggcatgagccactgcacccagctctcagcagaattttaaaagatttatcttccatctctgctgctctcttatttcctaaccattgaatgtgagatctatattggaatatatctgacaacttccagtagcacttttttataaaaaattgaaatctgtgttaatatagtagaatatattagagcttgcaacatagctaactggagagctattatggtttttgggtagccatatcatctgtctttatttgtcctgtaatagcagcataccaatttggtaaaatataagacactaaaattatgcttacctataattattcccactggataaattaatagcatgtcagactaatatctactgcaacgatttaatggtaaatttttttggatatcagatataaatatataagtatgaataattttatgtactagtcataaggtatgtaatattttaaaaaattatctgaactgtaattcagttgaaacactgtatttcaaaagtatgaataacaatattaaaataactaaggaattcaatcaaagtaaatattgtggccttatattcatactattgtagaaaatactgtttaatttatatgaatgcaggttgtctacaaacactacacataactatactaactgtactgaagtaacccaagtacaacagactccactgttcagtttatacactgaactcttctggcttttgcagtgtaagtatgtcagcctgcaaataatcaccttggataatcaggtttctgccaaagaacttactcagtatcttttagtctatattattctgcattgctaaatttattccgatctttgtgctcaacttttttatgctcttgaaatgaagtttactctgaacaaatctgtgtctagtttaaagactaaagaaagataaaaaaatataaccttttgccaagacaaaaagaaagcaatgaatctcaggtcccagataaagacaattctgagtcaaaaagaatgacaaaaggtttgtttcattgttaatatgatttacatatacttcaaaaagcagaagaaatatatacatataatctaaacttttttttaaaaaattaacaagttatcctcccttattttcacatatgagaataaaacctcttattgctaatttatattttctcttacaacagccaggtctctggacaagttcttgaactcttggatctctgaattttgcacagtgtgtgcacttgaaaggatgtttatggggggaaaagcagaagagagaaagatgttattaagaaaccccatgggttcacatgaataaagcaagttcttagagacctatgaagagacttagaatctgacacagtaataatcagagactacatctgacaagcactaatggacagatcattgaagaagaaaattaacaacaatattaggacctgaactcaacacttgaccaaatagtcctaatacacatctacagaactcttcatctaaaaataccataatatacattcttctcatcaccacgtggcacatactctaaaactgaccacacaatcagaaataaaacaattctcagcaaattcaaaaatcccaaaatgacacaaaccacacacacgggctacagcttaagaaaaatataattcaataccaataaaacaactggaaaccatacaattaaataaaaattaaatggcctacacctacacttgaataactttttggtaaataatgaaattaaagcagaaaccaagaagtgttttgaaacaaataagaacaaaaatacaaaataccagaatccctgcaatacagctaaggcagtgttaaaagaaaaattcatagcgttaaatcctcacatcagaaagttagatctcagtttaacaacctgatatcataaataaaagactgagagcagtaaaagcaaatcagtccctaagctagcaaaggcaagaagtaaccaaaatcggatctgaactgaaggagatttagacatgaaaaactacaaaatatcaagaaatcctggcattaaatctatttaaaaaaaaaaaaaaggaaataaactactagctaggttaatgaagatacgaataaacacaattagaaatgagaaaaagagacattaccactaacctcacaaaaatatactgaagtctgctatgcacataaaaaaaaatctagaagaaatgaaaaaattcttcaaaggacacaaatgtggctaacaagcatataaaaaaatgctcatcactgatcattagagaaatgcaaaagaaaaaccacaacaagaaatcatctcaaaccagtgagaacggccattattataattcaaccattgtgaaaagcagtgtgttgattcctcactaaactaaaaacaaaattaccatttgacccagtaacctcacaattgggtatatacctaaaaatatataaattattctatcataaagacacatgcacaatcacattcattgcagcactattcacaacagcaaagacacggaatcaacctaaatgcctatcaatggtagactggataaagaaaatatggtatggttgggcatgatggcacatgcctgtaatccagcactttgggggccaagccaggtggattgcctgagctcaggagtttgagaccggcatggacaacatagcaaaatcccatctataaaaaaaaaaaaaacataaagaaaaattagctaggcatggtggcacaagactttagtcttagctacttgggaagcttaagtagaagaggactgcttgagcctgagaggttgagagtcagcacagaccctgattcagggctcagtcccacaacattgtcctcactgcagatgccagtcacaaacttcatgggctcatctatgcttctgacctactgtttaaaaattggggactcccataacctttctgaaattcaataatctgatagagctactcacagaactcagcagaacactgtagttatatttacaggtttcaaataaaatatacaacccccaaaaagtcaaatggaagaaaagtatagaaccaagaaaagaggtgggaaaagatgaagcatatagataataaatagctgtgattaataaaattctctatcctctgtgttctccagtaacactttatgaaaagaaacacccttcccattatgacttagatggtactctctttacttacctaatacacagccaggaaaacactctgcatattttcttctttttctcattaaaaaagcagctgagtttgtcttcagtggtcaacataaaatacttcttaatcaaaattcacttgtttattttcttcccacaggctcctgaactctgagctatgctcagtctgagccaccatacaacctcattttatgtccctactaagaacacacagactttagggtaaaacattgtctgatctaaaatctgattatttcacccttcatttaaacattcccctcaccttttttctaatcttatttgcttttccctaggaaaaaaagcccttttctacctaatctttgcaatccttaaagatcttatagttggtacttcctcctgttgcaatactcctttggaattcttttttttttatatatacatctaactggtttattttaaaatctctcaaaactgcctcaaaaaagtaacaattttatcttcagtaagacactcccaaaccccttctatcttaaccttaactgcatctgtctgtggggccccagctttccaaggctctgtagcttctctcactatagaggcttcttccatggctggggtaagcaggctgggacatctgcaggaaaggctttccagaaggaactaactgggcctttaataacctccttttgccggctcaaaattaaccttcgctcgcagtcattgggctcaagctttaattaccatgtcagagtcattcacttagtttttgaaaataagtgtttgaaaaatccagcaaaatgattcaaaaacatataagaaaattttaaggtgcttacattttgtacctcagtaagagaagcaaatgtatttatttcttttggacaataaagtattattttattttttgtattaaaaatcatgtggtaaacagttacatgggaacacttctaggaggtaccaaatttcatcagataaaatttagcattaaactcagaaattgaaataacaggatatagaacaaagatatttactttagcaagtttaccctgcaaaaaaagaaactgatgttttcatgaaactatgtaactcaccaattatctaccacattttcttgtggaaatacattaattctctacagccgaaatggaagaaaaatttttcttattttttttccttggtagctaacattctaaaagctagatggaattctgtttgaaatcattcagccataaaaaacacacctgaaggccaggcatggtggcttacgcctgtaatcccagcactttgtggggccaaggcaggtggatcatgaggtcaggagatcgagaccaccctggctaacatggctaatatggcgaaaccccgtctctactaaaaatacaaaaaaattagctgggtgtggtggcgggcgcctgtagtcccagctactcgggagactgaagcaggagaatggcgtaaaccctggagacagagcttgcagtgagccgagatcccaccattgcactccagcctgggtgacagagcaagactctgcctcaaaaaaacaaaaaaacaaaaaaaaaaacaccagagaaaactcctaaattcactctgagaaagaaaaaggtgaatgagaattttcaacaaataaaatatacagatattattttctgaaactcacctttttatgctctttgtaaatattttcttacctttcaagccctactaataaaatgcaatttacagttaaaaaactgaggtcagccgggcacagtggctcacacctgcaatcccagcactttgggaggccaaggtgggcagattacttgaggtcagaattttcagctcaaacagcctggtcaacatggcaaacccccatctctactaaaaatacaaaaagtagccaggtgtggtggtgggcacctgtagtcccacctacttgggaggctgaggcatgagaatcacttgaactcgtgatgcagaggttgcagtgagccaagattgcaccactgcactacagcctgggcgacagaggaaaacactgtcaaaaaaaaaaaaaaaaaaaaccaaaaaaaaaaaaaccctgaggtcaaaataagtgaacaatgcatttaatcatgtcaaggtacggatatgtctgactcatgtgtcaagtcaggccatccaattacttgagagattctcccaccccatcctgttcacttaagtgctcaataatcattctctcaggagactctgaactatgccccagagtgccccaggtatattttactttgcaagtttttgcaccatctcactggggtcagttgtttttgtctttggagtgctattttatttcacaaaccttttaccatttttatttcactatttttctgtcccctaagagaatgcaggggcaaaaattattttggtttccccttcaataccagcatctgattgtctgaacagcaatgtgtctccaagaaatggaagctgggttgggtaaagacaatattaatatctcaagggagtagctttccaaaaaaacagcacaccagaagatgactcagccacagtgcattcacctgctctcttgagaagctacgcttcatatctcaggttgtcttatgggagatcagaggctacactccatacctcaggttgtcttatgggagaaaaagacccaggagctgatattcactagacactctcacagacatagccatggcgggtatcttggtttttccccagacagtactgaatctcaagtccaagaaaaaactgaagggtggctgaggacacatctccctataaagtttccaaagggaaatcttgacccaaaaacattgtgatatctgtgtctacggaaaacagaagaaaaaatatttacaaacagaaaacaaatctttttaaatgtgccatcaaatgctttgtcaaaaaatgattaaaataggtatcaaaatgtacactaaactatttgttgataatatgaataagggaggggaaattggcatttgggaatgtcagaaggaagtgaaaatcaagtattttactgcaagccagagtcaggccggagaaataggggatgggggatggacttgaggccctacttgggacacatgtgaaaaatgcaaggaaacagcagttccctgtggggtgtgaaaataattaagtggctggcagttagactgaggaggctgtagttcctaatttctacttttaaaaaatctaattcggccaggcgcggtggcttacacttgtaatcccagcactttgggaggccgaggcaggtggatcacttgaaatcaggagttcaagaccagcctgaccaacatggtgaaaccccatcgctattaaaaatacaaagttaacggggcgtggtggcgcatgcctgcaatcccagctacctgagaggctaaggcaggagaatcgcttgaacctgggaggcggagattgcagtgagcccagacggcgccattgcactccagccagggcgacagagtgagactttgtctcaaaaaaactaattcaaatgcattttttgtaaattactatattgggggaaaaaattcaggcttaacaaactataaactgccaattaacctctgattacataaccaagaaatttccatcttgatagtacgaattaagaaactacgtaactgtacctaaccaattatcgaatttggttttcttcattaggcaccttataaaactcttccgtcaaacctcttcaatagaccataaactacaacccatagctgggtgctctacaattttggaatcactctttggttaaattatttaatatttgtgcggtgacttctgcaaatttttaataggagaaaacaggggctgggaacctcacggaccaaagctctttccattcttgaacccacacgccgagtcaggattctcctgtgacgaccctcccatgctccctgcacatctgagagagactccgcgctgcgggtgcagagcggccccaagagggctccaggccagggcacaatcacagcgcagggaaaagacaggacgcccggggaccgggtgtcagcgcagccgccatcttatgcctgaagcggactgaggtcgagctaggcaaggagaacacggggcacagattgtggagctgactgagaggaggcctgagtcccgccacagccacttcccaccggttccaaccagcggctgccactctctcgggatgtcggacccggctgactcaccatttctaggcttccgggggtcctggcgacttagttgtgaatctcccaatacctgcaggtcacagggccatagaagctgggcctttaggagcggacgacacacagcagtaaggacgacaccttgacctccgcgtgcagcgagagccaacggtcctaccacatcccggaagccgccctgtccgctccagctgcgtgcctgattggacggtcccagtccagcgtccctgattggataatgtttaaggccccgccccttcaggccctgagtgacggaagatgttatcagatgctgggctgactgaagaaagagtgccagcccagtctgccgcaaaggccgggcgtgatggcttacgcctttaatcccatcggtttgggaggcggaggcggggggatcacctgaggtcagaagttcaagactagcctggtcgacctggtgaaactccttctctactaaaaatacaaaaattagttgggcgtggtggtgggcgcctgcaatcccagctactcaggaggctgaagcaggagaatcatttgaacccaggaggtggaggttgcagtgagccgagatcgggccattgcactccagcctgggcaacaagagtgaaacgccatctcaaaaaacaaaacaaaaaaccctaattttagtaaaatcttataaataaatccatcaaatttgtcatttttgaacgctctagattttcatatatattttataatctcttttttttatttgtttatctttttgagacagtctccctctgccgcccaggctggagtgcagtggcaggatctcggctaactgaaagctccgcctcccgggtgcaagtaattctcctccctcagcctccccagaagctgggattacaggcgcccgccaccacgccctgctaatttttgtttttttagtagagacagggtttcaccacgttgaggccaggctggtctgaaactactgacaggcaatccgcccaccttggcttcccaaagtgctgggattacaggcttgagccacggcgcccggccttataaacgcttataattttttaactctttcgattttattagacttttttttttaacttgaaacaacctttattttattttatttgagagtcttgctctgctggccaggctacagtgcaatggcatgatctcagctcactgcaacctccccctcttgggttcaagcgattctcctgcctcagcctcccgagtagctggattacaggcgccctccaccacacccagctaatttagcatggtggcctgaacctgtagtagcagctattcaggggctgaagtaggaggattgcctgagcccaggaggttgtgtctgcagtgagccctgatcaagccactgcactccattctgggtgacagagtgagaccctttctaaaaaaaaaaaaaaaaaaaagccaaagcatataaacttaaacttatgagagtttgggggttttatttttgtcttaaattattatatttcaatagttttggggtacaggtagtatttggttacatggataagttcttttgtggtgatttctgagatttcggtgcaccaatctcccaagtagagtgcgctgtacccaatgtgtactctttcatccctcatcccctctcccacccttcccactgagtgcccagagtccattatgtaattctttttaatttttaatttttttttttttgagacagagtttcacttgcctcggcctcccaaagtgctgagattacaagcgtgagccaccgcgcctggccccattttgtaatttttatgcctttgcatcttcatagcttagctcccacttataagtgaggacatacaatatttggggttttatctctttttttcttttcttttcttttttttttgagacggagtttgctgtaattacaggcatgagccaccatgcctggcctagtttttgatgttttgattatggtcttttctgtttgtttgtttgtttgtttttgatggagtctcgctctgtcgatctcggctcactgcaacctccgcctcctgggttcaagcgattctccagcctcagcctcccgagtagcagggattacagacccatgccatcgtgccctgctaatttttgtatttttagtagaggcggggttttaccatgttggccaagctggtctggaactcctgacctcaggtgatccaccagtctcggtctcccaaagtgctgggattacaggcatgagccaccatgaccagccaattatggtcattcttgcgagagtaaggtggtatcacgttgtggttttgatttgcatttccctgatcattaatcattagtgatattcagcattttttttctatgttggctatttgtatatcttcttttgagaattgtttaagtcccatctgtctttgtttttgttgcatttgctttggggttcttgttcgtgcactctttgcccaagtcaatgtctggaagagtttttccaatgctttagaattcgggtggtttcaggtcttagattaaagtatttgatccatcttgagttgatttttttataaggtgagagatgaagattcttttttttttttttttgagacggagtctcactctgttcccaggctggggtgcagtggcacgatctctgcctcccgggttcaagcaattatctgcctcagcctcccgagtagctgggattacaggcacccgccaccacacccggctaaattttttttgtagttttagtagagacggggtttcaccatcttggccaggctggtcttgaactcctgacctcgtgatccacccacctcgacctccctaagtgctgggataacaggtatgagccactgtgcccagccgaagatccagttttattcttcaatatgtggcttcccaattatgccagcatttattgaattgggtgttctttctccactttgtatctttgtttactttgtcaaagatcagttggctgtaaatatttgggttcatttctggtttcgctattctgtttcattggtctacatgtctatttttatacccatacaatgctgttttggtaactatagccttgtagtatagtttgaagtcatataatgtaatgccttcagatttttgtgtgtgtgtttttggttttattggttttttttttcttagtcttgctttgactttggaagctctctttttattttacataaattttaggattttttttagttctgtgaagaatgataatgttattttaatggaaattacattgaatttgtagattgtttttggtaggttgatcattgtcacagtaggattgctacccatccataagcatgaaatatgtttccatttgtttttgttgtctatgatttcttttagcagcattttgtagtttttctcatagagatctttcaccaccttggttagacatgttcctaattattttttttttttgcagctattttaaaatgagttgagttcttaatttaattcttagtttggtcactgttagcgtacaccagtgccactaacttgtgcacattgattttgtatcctgaaattttactgaatttatgtatcagattgaaaagcctttttttcttttttctttttgagacaaggtcttactctgttgcccaggctggagtgcagtagcatgatctctcggctcactgcaacctctgcctcctgggttcaagtgattctcctgtctcagcttccctagtagctggaattacagcctcttgccactgcgcctggctaatttttgtattcttagtagagacagggttttaccatgttggctaggctggtcttgaactcctgacctcagatgatccacctgcctccacctccccaagtgctgggattacaggcttgagccactgcacctggccctaaaagctttttagatgagtatttagggtttcccagctatacaattatatcattggtaaaaagtgacaatttgacttcctctttaccaatgttgtttattttttgctttactctgattgctctggccaagacttccattactatgttgaatagaagcggtgagagtgggcattattgtcttgttccagttctcagaaaaaatcctttcaactttttcccgttcagtgtaatgttggctgtttatcatagacagctttttttttcttttttctttctttttttcagacagagtcttgctctgtcgcccaggctggagtgcactggcacgatctccactcactgcaatttctgcctcccggactcaagcgattctcccgcctcagcctccccagtaactgggataacaggcacccaccatcatgcctggctaacttttgtagttttgtacagaccaggtttcaccatgttggccaggctgatctcaaactcctgacctcaggtgatttgcccaccttggcctcccaaagtgctgggattacaggcataagccaccgcgcccagcctgtcatagatggcttttatgaccttaaaatatgttccctctatcccgattttgctgaggattttaatcgtaaagggatgctggattttgccaaatgatttttctgtgtattttgagataatcatataatttttggttttaattctgtttatttgatgtataacatgtattgacttacctatgttaaatcatctctgcatccctggcataaaatgttctcgattatggtgtactatcttattaatatgctgctgtgttgggttagctagtattttatcgaagatttttgcattcatcaggaacattggtgtgtagttttcttttattatgtcttttcctgatcttggtattagagtgatattggcttcacagaatgacttaggaaggattgcatttttctctctcttttggaatagtttcagtaggactggtcccaattctttaaatgtcaggtagaattgagctacgaatccaccttgtcctggactttttttgttggcagtttgttttttgttttttttttcttgagtcttgctctgtcacccaggctggaatgtaatggtgcaatcttgactcactgcaacctctaacttctgggtttaagtgattctcctgactcagcctcccaagtagctgggattacaggccagcttgtgacctggctaatttttgtattttaagtagagatgggttttgccatgttgatcaggctgatctcaaacccctgacctcaaatgatccacccacctcatcctaccaaagtgctaggattacaggcatgagccactgtacccagccagcaattttttattattagtttaatcttgctacttgttattggtctcttcagggtttttatttcttcctggtttaatttaggagggttgtatattttcaggaatttatcgaactcctctaggttttctagtttgagcatgtaaaggtattcatagtagctttgaatgatcttttatttctaattgagcaaatttggaccttctgcttttctgggttaatctcactaatagtctgtcagtttggtttatcttttcaaatgactagcttattgttttatcttttatattttttaaatttcaattttatttagttctgctctgatctttgttattttttttttctgctgggtttggtttgttcttgtttctcttgttccttgaggtgtaatcttaggttgtttattgtggttttttgcactttttgatgtatgtatttcatactatgaactttcctcttagtactgcttttgctgtatcccagaagttttaatatgttgtgtcactattattcagtttagagaattatttaatttccatcttgatttcattgtgaacccaataatcattcaggagcagtttatttaattttcatgtatttgtatggttttgagtgttcctattggaattgatttctaattttattccactgtggcctaagacagtacttgataaaattttgatattcttaaatttattcaggggctgggcatggtggctcatgctttaatcccagtactttgggaggccaaggcaggcagataacctgaggtcagaagttcaaaaccagcctagccaacatggtgaaaccccatctctactaaaaatacaaaaattaggaacgcatggtggcacatgcgtgtaatcccagctacccagaaggctgaggcaggagaatcccttgaacctgggaggcagaggttgctgtgagctaaaattgcaccattgcactccagccttggtgacagagcaagactctgtcacacacacacaaaaaaaaaaaaaaaaaaaaaattcagacttgtcttgtgacttatcatatggtctatcttgaagaatgttttgtgtgctgatgaaaagaatgtatattctgcagttgctgggtggaatattctgtaaatatctgttaagtccatttgttctaaggtatagtttaagcccattgatttttgtttgtttcactttctctcctgatggcctgtctaatgctgtaagtaaagtataagtctcccactgtttttgtgttgttgtctatctcattgcatttcttaagggacaacttaggtgaaacaagaaaatttgtatttctgaagcatagagttaatattttaggctaaaatatatttttttctttgagacagagtcttgctctgtcgcccaagctggaatgcagtggcatgatcttggctcactgcaacttctgcctcccaggttcaagtgattcttctgcctcagactcttgagtagctaggactgtaggcacccaccaccatgcatggctaattgttctgtttttagtagaaacaaggttttaccatattggccaggctggtttcgaactcctgacctcaggtgatctgccctccttggcctcccagagtgttgggattatgggtgtgagccactgctcctggccttaaatgtaccatttatggtttttttaatatataatattatatgatctgcaaacatcaactctttacttacttgtcatcaatttcagtggctttaaacaatttttttttttgcctaactcttctgctacatacttccagggttatgttaaaatggaagcattgacaatggggacaatatagttttgcattgcattggtttttgtaaatttcattgaacgaaaacctcttcaagtttatataaagtggttacaagaggtaaagatcccatatttataggatgccctcttcatttgtaatagacagaggtggtaggttggtcacaaggctgctggttctacatagggtttacctttagttggcttgttaaaaaaggcttgggtagttgtaattcccattttattattggacagactgaatatccttcaggactttcatctgtagagcagacactaggggaagttgttgcagtcaggtctgcatatggtggggcttacatcaggatgtggatgaggattcctttcactgagtactagagagggtcttcccaggtcactgtgtgggattctaccaaggcagaattgtccatgaactgtggcttggaactagaagtaaaacattaaactgtatggctacaaatgggaatcttcctccaggtctctggaagagcaggagctctcccaggctgtggctgggaggagtttggaatggttataaggtaagttcagaattctcagtgggagcaagttgggttggctattttttggtctgtagccaagaagagatgtcctgtagtttgccaccttaatagaagcctgtctcctgaaaagaacatacctcaatcttgggctttaggagagtttcacaactccatccctggatctcaacttaccttttaccttagaaggaatatcttgacaggccctagaccactggacccctagaaattttactgaggtagaaggtccctaaattttagtcagttttattttccatcctctagaatgtaaatgtctcataaataagtccagtgtgtttgctatttcttgctcattggattcaatcagcataatgtcatcaatgtaatggaccactgtaatatttgcaaaagcaaaaagtgacagaggtctctttgaataagattatgacacaaagccagagagttgatatatccttgaggtagaacagtaaaggtatattgccgactttgccagctgaaagcaaattgcttctggtgggccttatggacagcaatggagaaaagggcaattgctaagtcaatgtctgcataccaggtacaaagagatgcgttaatttgctcaagcaacgaaaccatatctggtacagcagctgcaactggagtcatcacttggttaagcttacaataatccactgtcattctccaaaatccatctgtcttctgtacaggccaaacgaaagagttgaatgaggatgtggtaggaatcaccgcctctgcatcctttaagtccgtgatggtggcactaatctctgcactccctccatggatacaatattggttttgatttactattttcataggtagaggcagatctaatggcttccatttggcttttcccaccataatagccctcaccctactagtcagcaagccaatttgggaattctgccatctgctaagtatgtctatgccaattatgcattcgggcactggggaaatgaccacaaaatgagtcttgggactcactggaccaactctaagttggacctgtgctaaatctctattaagtacctgacctctataagcccctattttaactggaggaccacagtgatgttttgggtccccaggaatcaatgtcagctcagagccagtgtttagtagtccccaaaatatccaatcatttcccttttcccagtgcactgttacccccataaaaggccagagatctacttggggaaagatgggagaaagattcactggataaattgttggtagtgtagtggggttgctcttcaagagaatccagcctcccctttattcaaggggttctgggtctgtaaactggctcaagtctggaaattgattgaggggccatgattctctgtttttatatttcaaattagtcttctgcccattcaacctagaatttttctgcttgtataaattaagtaggaatgcagtaggtttcctatcaattttacttctaggaacatcgtgatgaatcagccaatgccagaactctacacaagtcagactgttctgattgccattttgcctctgctgtccattacagtagctatgcccaccttgcctttgatggtcgagtgccaccacttggcccctgccacctcgggatccaattattcccattgtatttacattttttagctgagtgactgcggttcccattgttggacctgacatgcaaagaagagcaattacagggctcttcaaagattcaggtgctgccctcacaaatctattttgcaaggcaatggtcaagggtatatattttggaccttccctgctggaattagtaggtctaaagtgactaatccactccagtatcgcaatctccctaagccttttgatctctccctctacattaaaccaagggacatcaggcatttccagctcactcacagtgggctatcatttttttttttttttttttttgagacagagttttgctcttgttgcccaggctggagtgcaatggcacaatctcggctcactgcaacctccacctcctaggttcaagcgattctcctgcctcagcctcccgagtagctgggattacaggcatgcaccaccacacccggctaattttgtatttttagtagagacagggtttctccatgttggtcaggctggtctcgaactcctgacctcaagtgatccacctgcctcagcctcccaaagtgctgggattacaggcatgagccaccacacccggccagtgggccatcttttaatccatatttcagctaaccaagcaaagaaactattagaaacttgtttaactccccaacctgcaacattaaatgcagtgttcctatttagtggggcctaataaataaattctgcctgattcaaccctatgttccttccaccattatcccacacccttaacattcatctccaagcctgttctccaaatttctatttatataaattagaaaactcaagcagttctttttgagtgcagtacaccttctcatggggaacactctcaacctcacctctgaaggtccactgggactttagtctacttatatgccaagaagcaaacatgggtgttgaggttggctcctgagaagaatcaacattattttgcctgggaactgcctcagggaaggccatcactgttgcctcaggcagtgcagggtttatttcaaaggtggaaaggcagcagggatcagaaaggggatgttaccactactggggatggggaagctctttcttctaacagaaaaggttcatcggagtttgcaaactcagtcaccccggcttcatcagggtccttccacacatccccattccaagtggcagggtcccattcttttccaataaatgccctcactttaatagtagacacctggcgaggttgcccatacaccttttgttgcagatcagccactagcacaataacagtttgtgtctgtttttccacaatttcagctctttctctacaggagatgagactctcactcagggtgatcttagcagatttgaggctcagtatctgcttctaaagccaaaagatagaatccctgagttcatcattttatatcatctctctgtccactgaacttaggacaaccagcttcattatgttcctttgttctccacatatggtcaaaggttgtttttgttttgttttgttttgagatagactctcactctgtcaccaaggctggagggcagtggtgcgatctcagttcactgcaaactccgcctcccgggttcaagcaattctctgcctcagcctccggagtagctgggattacaggtgcctgccaccacacccagctaatttttgtatttttagtagagatggggtttcaccatcttggccaggctggtcttgaactcctgaccttttgatccacctgcctcggcctcccaaagtgctgggattataggtgtgagccactgcgcccggctggtcaaaggtattatgtatagagtcactaaactccttgcctcccatgagtgatagtgtcatatgcatttattttacataacttcttaaactgttcatcccaagggctatcagtgttctccatactattagaagtagagtctttagcatttttgggtctaatcatattaagcagccaactccagaaaccccagaatcaaaaaagaactctatacttaatattcttttcctctagaatcactcctggtaccaaaatctgtattagtcagggttctctagagggacataagtattaactcacacaatcacaagatcccacaatagactgtctgcaggctgagaatgaaggagagccactccgagtcccaaaaatgaagaacttggaatctggtgttcaagggcaggaagcatccagcacaggagaaagatgtaggctgggagactaggccaatctctcttttcacatttttctgcctgcttatattctaaccatgctggcagctgattagattgtgcccatccagattaagggtgggtctgccttttccagcccactgactcaattgttaatctcctttggcaacaccctcacagacacacccaagattgatacgtcgtatccttcaatccaatcaaattgacactcagtattaactatcacacctagttaaaagagtcaaccaacatccctccatttggctgaatccaggtgaaacagtcatcaccatttttctaagctgaatccagaaatgagtcagcattccacctatgggcagactcacatatcacagtcacaattccaatggtgaatttttttgatgtgtgagatttagaaccttaccagtgggctctgtttatatgtgaaggtgacaatactgttagctttgtttgtgtattaaagggtcaatctcacctgtgtgctgggcctgtgataaaactttgtactgccagagggcttcatgtaatttccattaactgtaataatcttctgtgagtctcatacaggtaggagaccaaggaccataccagtttcctcaagcctagctataatagtcaacatatcttttattggctggatccaggtatgagagttatcaatgtgcctgtgagctaactttataaataggtcaacatcacacctgtggctggatctacatatgacattccaactgcggactgtgtccatgtacaagattcaagacctaaccagaggtctctgtccatgtgtgagggtgacactcataacttttggcaggatgagcatacgagatacttcacctgtgtgctgggtgcagttatatgtcaaaatcccacctgtggaaaagaaacaagctaagagagtcacatattttaaattctaggctaaagatatgttaaaatatgccttgcaggcggggctcaggaaagagagttacatcacctgagtgctgtgacgggtgatatgtcacaatgccttctatgggcatggctcaggcaggagttttacattatttttgtgttggccctatgatatgtaacaatccccctccatttgcatgacctagagaaaatagaagagtcacagcacctaaattatgaccatagagatctatcatgatacctcctatgggcagagcctaagatagagggtcacatcacctgcaaactgggctcagtacaatgtttcaatctcccctgaggccagagcccaggcagaagaggagagttatatcacctaagtgcttgggcctgtggtatgtcacagttcatttttggggggtggcagaatgcaggcaaaggaggagtgttacatcacctaggtaatgggttcagaagtatttcacaatacctactgtgggcagggcccaggcagtacagtcacatcatggagatgctgggctcagtgatatctcacaaagactttgtggacagggcccaggctgaaaataagagtcacatgacctaagtgctgggcccagtgaaatttcacaataccctctgtaggtagggcttaagcaagagagtcacatcacaatcttttctgagagctgggcccaggcagggaagtaaaatcactcaggtgctaggcaaaagtatatgtcacaatcatacctgtgggaagatctagggctaggattcacaattccacacatgtcccagcttcaggtaaaaagcgtcaacacctcctgtgagttgcatccaagtacatgagtcacagtatcaatgatgaactggatccatgcatgagagtcccaattccacctgcagactgtgtattatgttggctttatgatatgtcaaaatccgcctccatttgcatgacctagagaaaatagaagagtcacagagccttctgtgactggtatcagagtcaaagccttctaggtgtgttgaatcctggtcttagagtcaccatccacctgtagacaaaatccagtaaaacaattacaatcccaactttcgactgcatccgagtgtgagattcagaagctcaacagttttctgtatccatgcaggagggtgacaatttttactaggcgctagaagtgcatatgagaattaaaatctcagcttgttctgggtcctcttatgacactctctgtaccaccccgagggctttacattgtttgggtgagagtcatcatctgctgtgagacattagtgctggtataaattcatgatcttgcctattgccctaagcttaggtatgaaagtcaacatctctcctattgtctgggtccaggtatgaaagtcattgctgtgcctcttagttgggttttatgagtcaccctcccacctgtggttggatccacacatgacattaaaaattccaactgtggactgcatctgtaagtgagtttcaggacttcacaagtgggttctgtccatatatgtgggggacaattcttactgtttgctgggtgtgcatttgagagtcacaatctcaaattttgctgagttatgtaatgacactttttgtacaacctgagggcattatacaatattagtgagtgtagtaatcctctgtgacatttatacaagtagaaaacccaaaaccttacctgttgccctaagcctaagtacaagcatcaacatatcttctattggctgggtttattgtgcaagtgaattgggttcagaaatttgccaccatccaaccggcggaataggttcatgtgtgaggttcaggacctcaccagtaagctcagtctacatgtgagggtggcaattcaaactgttggttaggtgtgtataggagagtcacaatctcacctgtgtgctcagtcttgtaatgacactctgtattgcccaaaagctttatacaatatgtgtgagtgtcataatcttctgttaccttcctacaagtaaaagacctagacccctaagcctagctaccagagtcaacatctctcttattggctgggcccatgtttgacagtcatcaccatttctgtgagctgaatccagaaatgaatcaccatcccacttatggcaagatatacatatgacagtcacaattccagctgttgactgcattcactcatgagactcaggacctcaacagcagtctttgtccatgtgttatagtgacaatagtaactgttgtatgggattgcatacaagaataaaaatctcatctgtgtcctggaccacatcatatttcacaatcttatctgtgggaaaggttaaaaaatgagagtaacatcacctgaattcttcacctggaatatgtctcaatctcctctatgggcaaggcccagactggagaattggatcacttgcatgcagggtccggtgacatattataatattttctctaggcacagctcaggcaggagagtcacaacatttgggtgctgggctcagagatatgccacaatcccttttttgggcatgtctcctgcaacagagaagaggcacattatgtagaaaattggtacagggatttgtcacaatgtccccttttggtggtgcacaggcaggtgaggagagtcacatcacccagataatgggcctagcaatatatcacaatgccccctgatggaagggcaaagacaagaaagtcacataacctaggtgagaaaacctgacataggtcacaatgcatgttatgagtagggatcatggaaaagaggagagtcatataacctggaggctgcactcagataaatgtcataatcatcccagtgggcagggcctaggcatgagaggagagtcacatcacataaatgctaggcctagcgatatgtcatagtccccactgtgtacaggtcccagaataaagtaaagagtcacaccatctacatgttgggaccaaagatatgtagcaattacacctgtgggcaggggtcaggcagaagagccacagcacctgtgtgctggaccctgtgataagttttttttttatttatctgttggcatggcccagtcagaagaggcaaatcaaaccacctgggttctgggcccagtgatatgtcacaatgtcttccataggcaaagcccaggtaacagaggagactcacatcaaataattgatggacccagagatatttcacaatgcccgctgtgagcaagagccaggcaagagactcacatcacttttgtgctgggccactatcttttgtgtgagcagaacataggaaaaagagaagcattggccgggcgcggtggctcatgcctgtaatctcagcactttgcggggctgaggagggtggatcacctgagatcaggagtttgagaccagcctgaccaacaaggtgaagccccgtctctactaaaaatacaaaatacaccaagtgtgatggcaggtgcctgtagtcccagctgctcaggaggctgagacagaagaatttcttgaacccaggaggcagatattgcagtgagccgagatcgtgccactgcactccagcctgggtgatggagcaagactccatctcaaaaaaaaaaaaaaaaaaaaaaaaaaaaaaaaaaaaaagagagagaagcatcacatcagcagagtgctgagcccagatatgtcccaatccccctgtgagcagaatgcatgcagaagagagtcaacatacatggatgatgggcacagagatatttcataatgtccactgcaggaagggcacaggaagaagtgtaacatcacttgagtgttggacagtgcaatatgtcaaaatagccaatgtggtcagggcacaggcagaaatcacataacctgggtgcagggcctgacagtgcatcacagtgtcctctatgggcggagccaaggcaggagaataggtcacatcagctaagtgcttggccaagtgatacgtcataatccctactgggggctggaccgaggctgggaagtcaaatcgctcagattctgggcagaagcatacatcagaattacaccagcaggaaggtcctgaaatgaaattaacaatcccacacatgtcccagtttcaggtatgagagtcaacaccttctgtaggtttggtttaagtacctgagtcacagtttcaacaatggactgaatttgtacacaaaagacccaatcccttctgaagactgtgtccccttattgaagccacagcctcacagccatgaggaatcttggtctgagagtaaccaacccacctatggatcagatccacatataagagttaattattcaacttcccattgcctctggttgggagattcagagcctcaacagtgggctgtgctcatgtgaaaggatgacaatatttgctattggctacctgtgcataagagtgtcacaatattacctgtgtgctgggtgctgtaaggacactttctctaccattcaagggctgtatatgctatgcatgagagttagaatttgctctgagacctccatgctagtatgaacccatgattgtcacccgtggccctaagctcatgtatgagactcaacatctctttaattgacttggtccagataggagattcctcaactgcctatgagatggctttagaaatgagtcgccatctcaattgtggttggatgtttacatatgacagtcacaattccaactgtaaactgcatccgtgtatgaagttcaagacctcaccagtaaactgtgtccttgcatgaatgcaataatcctaataattggtggggtgtacacacaatataaacaatctcacctgtgtgttgggcactgtgaagacactctctgtatcacctgagggctttatacagtatgtgagggagtggaaattctctatgacctttctacaaaaaggagactcaggatcttacccatttctctaagcttagctacaagagacagtatctcttctggtgactgttatgagagttattattgcacctgtcagccaggccaagatgtatgttacaatcccatttgtcagtagagagtgagcaggatggtcacatcacatgagtgctgggaaagggttatgtcacagtcatttttgaggccagggaccagggataaaagaaatatcaccttagtgctaggccaagggttatgttccactgttttctgtgggcaaggtgcaggcaaaacaaactcatcaccttgttactgggcccagtgatatgtcacaattttcactgagggcaaagtggaggctaaaaacaagggtcatatctcttaggtcatgatgcagagatacatcacaaggcctcccgtgggcaggccacaggtagaaatcaccaatttcctaggtgttggagcctgtgatatgtcaaaacacacaatgtatgcagggcccatgcaggagagaagagtcacataacttaggtactgagcctagcaatacatcccaatttcttcttggacagagcccaagagatagaagagtcttattacccaggtgttgggtctagctatatgtcaaaatattctctgaagggagagatcagggaggagtgtaacctcacctaggtcagaagcccagagatgttgccgattctgtgtaagtctcaggaaaaagagaagagtcaggtatcctagaaactaggctacattatatgttgcaattatccaagtgggagggttctcatgagaagagagtcacaacatgtagctgctgagctaaacgatgcatcacaattcccactgcgtactggtcccagaaagaagaggagagtcccatcatctaggtgatgggtccagaaatatggcatacgcatcctgtgggcaagcaacaggcagaggtatctcagcatgtctgtagtaggcccggtattaagttactctcccttgtatgggcatgatccaggcagaagaagtcacatcacctaggtgctgggcccagagatatatcacaatatcttttgtgggaaaagacaaggtaaaagaagagacatcaaatagttgatgggtctagagatatgttacaatctttctgtgggcagggtctaggcaggagactcagtcactgtggtcctgggcacagcactatgtaaaaatgctttattttggaagagccaaggcagaagaatatcacctgtctgttagcccagcgacttgtcacaatatcccctgcaaactgaaccttgaaagaagattagagtaatgtcagctaggtgctggccccaattatttgtcaaaatccttcttttgaaaagaaattggtagaagaggattatcaaaacacaaagttgattggtgcatagatatgtcacaaaaatccttgtaggcagggccaggcaggagagttacatcacctgggtattggacccagcaacatgtcaaaattgcccatatgggcagggcacaggcaggggactcacataacctgaatgtggtgccaagtgatatgtgacagtgccccctgtgggcagcatgaaggcagaagagactcacatcacctggatgcaaggccaagcaatatgtcacaatgttcccttttggcaacgctaaggcaggagtatgcagctgcatcacctaattgttggttttgatgaaattttataatttcagctgtgggctgggcccagggagtagagttaaatcactcaggtgatgggcagaatctatgtcacaatcatatctgcaggaatatccaggtatgtgattaacaatcccatatatgtctaggttctaggtgtaagattcaatagccggccaggcatggtggctcacgcctgtaatcccagcactttgggaggccaaggcagacagatcacctgaggtcaagattttgacctcagatggccaacgaggtgaaactccgtctctactaaaaatacaaaaattagccaggtgtggtgccaggtgtctgtaatcccagctactctactcaggaggctgaggcaggagaattgcttgaatccaggaggtggaggttgcagtgagccaagatctgccactgcactccagcctggggaaaaagagtcaggctccatctaaagaaaaaaaaaaaaaaaaaaaaaaaattcagcagctcatgtatgttggacctaagtaaaggagtcacaatctaagtggtagaataatctgtccatgagacccttaatccctcctgtgacctgcttctccttagtgaagtcacagcctcagacttgtgttgaatctgagactcaccatcccacctgtgaatgggatccaggtatgatagtcaattttctaacttttgactgccttcgagtctgagattcagaagctcaatcactggctgtttcatgagacagaatgacaatctttactgttgactgggtgtgcatatgagtggcacagtctcacctgtgtgctgggctctgttggaacacattctgcaccgcctgagggctttatgcagtgtgcctaaaagtcacagtctgctctgagacctttctgcttttatagacccatggtcatacctgtgaccctaagttcaggtgtgagcatagttggcagggttcaaattagagagtcctcactctctagtcagcagggtctagactggagagtcgtcacccacctgcgcactggatttattaatgagtcaccaccttaattgttgccggatgttaatatatgacagtaacaattccaactttgaaccatatccacctgtaagattcaggacctcaacagttggctgttgccatgtgtgagggtgacaatcataacagttggcagtttgtgcattgtagaaacaatctcacctgtgtgctaagccctgtgaagacactctttgtggcacccaaaagtttatagaacacactaaagattggtaattcattatgacattcatacaaagagaaggcccagggtcttgtttcctaatctacactacaagagacactatctcccctattggctgattccaggtatcatcatagcacctatgagttgggccaggatatttgtcacaatctcacctgtaagtagaaaatgagcagaagagtcacatcacctggatgctgtatgaggaatgtcacaatattttctggaagcagggcacaggcagaagagtcacataacctggtggctgagcccagtgatgtttcacaatgctccctgtgggaaaagacctgccagaaaagacacatcacctggttactgggcagagctatatgtcacaatcttctctatgtgcaggctgcaggcagaaaaagagtcacatcacttaggcgatagatgcagacatatgtcacaaggccgcctatgggcagggcttattcagtagcctctgatccaatcctgtaggtgttgggtccagcgacatgtcacaataccaaaaatatgcatggctcagcaaaagaaaagatttacatcatctaggtactggatccagtgatatgtcacaatcttcttttttggcatagctcaggaagaagtagagagtcacatcaccaaggtgttggatcaagccatatgtcacaatacacaataaatgcagggctcatgaaaagatgagagtcaaatctcttaggtgtggaacagtggtacatcacaatttctcctttgtcagagccacatcacctaggtggctggcccagtaatatgtcacaattcccttgagaggtgagcccaggcaggagagtcacatcatttcggtgagaaccccacagatgtgtcattattttccctgtgaatagggctcaggaagaaaatgacagtcacatcatttaaatgatgggcccagagatagattacaatggctcctgggtacaaaaaccaggcagaagaattacatcacctgtgtgctgggcccagtgataagtcactttcccttgtgtgggcatggcttcagcaggagagaagcgtcacatcactaaggttctggttccagagatatgtcacaatctctcctattgacaaagcatgggtaggagaggagagtcaaatgaagcagttgatgggcccagagatatgtcacaatgccccccccccccccgcccgtaggcagagtacaagcaggtacctcccaattctttagatgttgtggccagggacatgtcacaatacttaaaaaatgcaggacacaggcaataaaacaaagtcacatcacctaggtgctaggttcagcgatatatcacaatccctaattcaagaggggagataaaaagattcacgtaaccaaggtgttaaatgtaaagatatgtcataatattcctgtgggcagagaccattcaggagagtcacattaccttaatgttggacccagccatatatcacaatacacagcatatccagagttcaagcagggaagaaaaatcacatcatctagttgctgggtttgataatatgtcacaatcacttgtttttgtagaacccagacagaaaagaagagtcacatctcctggttgatggatgcagagataagccaaaagactccttgtggccaggacccaggcgggaggttctcatgccctaggtgtttgtctcagccatacgtcatattaccaaatatatgcagggcccaggcaaacaaggagagtcataacaccttggtgctaagtttagtgatatgttacgatccccacttttggcagggccgggacacacacacacacaaagtcacatcacctaggcagtataaaaaaagatatgtcataatacccctgtagacagggtccattcagaagagtctcatcacctagcttttagactcagttatttgtcacaatacacaatttatgcaagactcagtcaaaagaggaaagtcatgtaacctaggtgctgggtccagtgatacattacaatctctccttgggtaaagtccaagcactagaaaagagttacattacctaggtacttggtccaggaatatgtcacaatacctcctgaggaaagagcccaggaaggggagtcacatcacctaatcgtggggtccaaagatatttcccagtgcttcttgtaggtagagctgaggataagcaaaagagtcacataacctaggggctgggcccagctatatgtcacaactaccccaggtggcaagtctctggtatgaaaggagaatcacatcacatagatactgggccaagcaatatgtcacaatctccactgtaggaaggtcccaggaaaagagaagagtcacattatctgggtgacgggcacaggaacatatcataattaccctaagcatatgtgttactgtcatgcgcaaccgcgtgaagagaccaccaaacaggctttgtgtaagcaataaagctttttaatcacctgggtgcaagcgggctgagtccgaaaaaagagtcagcgaagggagataggggtggggccgttttaaaggatttgggcgggtagtggaaaattacagtcaaagggggtttttctcttgcaggcaggggtgggggtcacaaggtgctcagtgagggaggttctgagccaggagaaggaatttcacaacattaatggctcagttaaggtggggcaggaacaaatcacaatggtggaatgtcatcagttaaggcaggaaccagcaattttcacttcttttgtgattcttcacttgcttcaggccatccgcatgtattcctgcaggtcacaggggatatcatggcttagcttgggctcagaggcctgacagttaggtcacctgtgtgtgaggcccagtgataagccactcttccttttgtgcacagggtctaagcaaaagatgaaaagtcacatcacctaggtgctgggcttacagaattgtctcaatctctcctatggtcaaagccaatttaagagacataaatcatattagctgctctgcctatggagcagccatctttttgtttctttacttctctaataaacttggtttcactttactgcatggactcaccttggcttctttctttcttgcatgagatccaagaaccctttcttggggtgtgaatcaaaagccctttccagaacagctttttggcaaactataaagggactatactgatgagaaacctgacccaaaggaaataactacagcaccaattagcctgctttgggtaactagtggggtacatttttttcacacacgtccatgtgaagagaccaccaaacaggctttgtgtgagcaataaagctttttaatcacctggatgcaggtgggctgagtctgaaaagaaagtcagtgaagggagataggggtagggccattttataggattcgggtaggtaatggaaaattacagtcaaagggggttgttctctggttggcaggggttgggggtcacaaggtgctcagtgggggagcttttgagccaggatgagccaggagaaggaatttcacaaagtaatgtcatcagttaaggcaggaactggccattttcacttcttttgtgattcttcacttgcttcaggtcatctggatgaatacgtgcaggcatgggctcagagacctgacatttattaatattttcttatattaataagaaaaataaaatagtgttgaagtgttggggcagtgaaaatttttgggagtggtatggagagataatgggcgatgtttctcagggctgctttgagcgggattaggggcagcgtgggaacctagagtgggagagattaagctgaaggaagattttgtggtaaggggtgacattgtggggttgttagaaggagcatttgtcatatcgaatgattggtgatggcctggatgcagttttgtatgaattgaaaaactaaacagaagacacaaggtctgaataagagaaggagaaaaataggtattaaaggactaagaattgggaggacccaggacatccaattagagagtgtccaagggggttcagcataattacttgctttgctggcaagtttttgagctctatccttgacagagtcctcctttttaagttggaggttgagtttgctgaggtgtgtttttaaaaaaccattagtctgttctacctttcctgatgattgaggacggtaaggggtatgaagtttccactgaataccaagagcctgaaaaactgcttgggtgatttgactaataaaggccagtccgttattggactgtatagaggtgggaaggccaaaccaaggaattatgtcttacagaagggaagaaatgaccatggtggccttttcagaccctgtgggaaaggcctctacctaaccagtgaaagtgtctacccagaccaagaggtattttagtttcctgactcgagacacgtaagtaaagtcaatttgccagtcctgggcaggggtaaatccctgagcctgatgtgtatggaagggaggggacctgaaaaatccctgaggagtactagaatagcagatggaacactgagaggtgatttccttgaggacagatttccacaatggaaaggaaatgagaggttctaagaggtgggctagtggcttgtaacctacatggaagaggttatgaaatgttgatggaatagaataggcctgtgaggctggaaggacatggacatattttccttggtctaagaaccatttgccttgtgtgggaagagattcataggtggaagtttcagtgggggagtaggtgggagtgaccgatgagaaggagaaaaactggccatgagggacagaagttggaatgctagctgcttctttagctacctcagcagcataagcgttgtcctgagctatgagatctgacgtcttctgatggcccttgcagtgaatgactccagcttcctttggaagtaaagcggccttgagaagagtttttattaaagaggcattaaagatggaggacccttgcatagcgaggaaacctttttcagcccatataacaacatggtggtgcaggatatggaaggtatatttagagtcagtatgaatattgacacatcatcaatatttgtgagagtgagggttcaagttaaggcaatgagttcgacttgctgagagctggtggagggggcagagtggtagcctcaatgatagatgtggaagatactatagcatagcctgcctttgctgatgagcggcgagtaggcctggtggaactgccattgataaaccaagtgtgattagagtgaggaacaagaaagaaggaaatatggggaaatggagtgaatgtcaggtggatcagggagatatagtcatgggggtcaggtgtggtatccggaataatgtgggagcctggattgaagtctgggccaggaacaatggtaattgtgggaggctcaacaaagagtgagtatagctgaaggagctggggagcagaaagtatatgtgttagctgtgaggaagaaaatagattttggaagttatgagaactgtagagagtgagttgagcatagtttgtgattttgagggcctctaaaatattaaagcagcggcagccacagcacacagacatgagggctaggctaaaacagtaaggtcaagttgtttggacagaaaggctacagggcgcagtcccagctcttctgtaagaactctgaccacacagccctgcacttcagctgtgtgtaatgaaaagggagtgatgagttagggagagctagtgtgggagctgtttttcaaggaatggaaaggggagtggggaaaggatttaggatctatggggtaagctaggtttgcttttctgagtttatataatcgtttagtcaggatggtaaaactaggtatccaaaggcagaagtacctaaccatgcctaagaaggaaaggagttgttgttttatagaaagggttggggttcagaagattagccagacatgattagcagggagagcttgtgtgttttcatgaagaattatgccgagataggtaacagatggggaataaatttgggcttgacttaagtaatgggggctgtccgtgaagccttgtggcagtacagcccaggtaatttgctgagcccaatgggtgtcagggtcagtccaaatgaaagcgaagagaggctgggatgaagggtgcaaaggaatagtaaagaaagcatgtttgagatccagaacagaataacgggttgtggaggggttgtggagggaggtattgaggataggagagtatatgggtttggctccacggagtggataggcaaaacaatttggttgataaggtgcagatcctgaactaacttgtaagacttgcccagtttttggacaggtaaaatgggggaattgtaagaagagtttataggctttaaaagaccatgctgtaacaggtgagtgataacaggctttaatccttttaaagagtgctgtgggatgggatattggcattcagtggcataagggtggttaggttttaacaggatggtaaggggtgcatgttcggttgccaaggaaggagtagaggtgtcctatacttgtggattaaggtggggagaaacaaggggaggaggcaaaggaggctttgaactgggaaaaagggtagcaatgaggtgtggctgtagcctaggaatagtcagggaagcaaataatttagttaaaatgcctagacctgataagggaactgggcaggtggggataactaaaaaggagtgcataaaagaatattgtccaagttggcaccagagttggggagttttaagaggtttagaagcctggccatcaatacccacaacagttatggagacaagggaaacaggcccttgaaaagaaggtaatatggaatgggcagcctctgtgttgattaagaaggggaaggacttaccctccactgtaagagttactcaaagtgtctatgatggtccaggaggcttccgaggtgatcagagcagcatcagtcttcagctgctaagccgagaagatatgggaaagagtcagtcagagccttgggccaattggacagtccaatttccagtggggtcccacacagatgggacatggcttaggaggaatcctgggctgtgggcattccttggcccagtggccagatttccagcacttgaagtaagatcctgggggaggaggtcctgaaggaacacctgactgctgtggcttaggcgttttgaagttcttgtgtgctggagatgtggctggggtttctctcacagcagaggaaagtaattgcaactcttctctattattgtacaccttgaaggtgaggttaattaagtcctgttgtggggtttgagggccagaatataatttttggagttttatttaatgttgggagcagattgggtaataaaatgcatattgagaataagatggccttctgacacttcagggtctagggctgtaaagtgtctaagggttgttgccaaacaggccatgaactgcgctgtgtttttatatttgatgataaagagcctaaacgctaactgatttgggagaggtcagataaagaaaaaggagcattaaccttgactatgcctttagctccagccacctttttaagaggaaattgctgggcaggtgggggagagctagtcacgaaacaaaactgtaagccagaccaggtgtgagcaggggaggtgataaaggattatagggttggggaagagaggctgaggaagaatcaggacctgactcggcctggcaaggagcagtctggggaggagaggtcagatgggtctgtagaaaaggattcaaaagactcagtgacacttggggttgggactgaagggacaggtgggagggaaagaaggaggatttgggatgagttgcattgggaacggagactagggagggaccgatgtgtaaaagaatgcctggacatcaggcacctcagatcatttgcccatttttcaacaaaaatcatccaggtcttgtaaaatggagaaatcaaaagtaccattttctggctatttagaaccattatcgagtttgtattggggccaaacagtgttgcagaagaaaataaaatgcttaggttttaggtcaggtgagaattgaagaggttttaagtttttgagaacataggataagggagaagaagggggaatggagggtggaaggttgcccatagtgaaggaggcaagcccagagaaaagagagggtagagacacagagaaggggtgggtagtgagcagccctgggctgcaatgtgggtgagcagccaaagcaggcatccccacaattgacttgccactaaggaaatgtgggtgaatgaccaaggcaggcatcccagtggtgatcagacacaaatggagtgtgggtgaataattaggcaggcatcccagcagtgattaaacaccaagggaagactgtcttcccgagtctgtgactggcgctggagttttgggtccacggataaaagtgtctcctttgtctctactagcgaggaaaaagaactggaattggaaggacagggagattgaagggtagcaagagaggctggagaagagagtgaaaagacagcttacccaatttgaaattggtgagatgttgcttgggctggttggtctgaggacccgaggttgtaggtggatctccttatggagtgagggcgaggacaggggaccggtctcccaaaggagtcctcctatcctgggtcttcggcaccaaatgtcacgtgcatctgtgtaaagagaccaccaaacagtctttgtgtgagcaacaaggctatttatttcacctgggaacaggctggctgagtccaaaaagagagtccgcgaagggagataggggtggggctgttttataggatttgggtaggtagtggaaaattacagtcaaagggggttgttctctggcggtcaggggtgggggtcacaaggttctcaatgggggaggttctgagccaggagaaggaatttcacaaggtaatgtcatcagttaaggcaggaacaggccattttcacttcttttgtgattcttcacttgcttcaggccatctggatatatacatgcaggtcacaggggatatgatggcttagcttgggctcagaggtgtgacaaaaatcaagaaaaatacttcagtccgctgagaaaaattctttttccaacaaaacaacatccaagaaagaaaaacattaaggccttttttttttttttttttttttttgagacagagtctcactgtgtcacccaggctggagtgcagtggcacaatcttggctcactgcaacctctgcctcctggattcaagcagttctcctatctcagcctcctgagtagctgggactacaggtgcatgccaccacacccggctaatttttttgtatttttagtagagatggggtttcaccatattggtcaggctggtctcaaactcctgacctcaggtgatacatccgcaaggccttttaaatatacttataacttggatgtccacttttaattaagctgatcgctctttaagaaaattcttttaactcccttattacttaactttagccatgccaagcagccattatttctggcttccaaattttattagaagttcagagaaaggagaatcgaaggcagttcataaaggaaaaaagaattagcaaaaagcaaaagtcacacagacatcaaaccagaaagaactcattttctaagccaggattaaaccccagacaaccattgtaaaatcgcaaaggctagaacaaaacattatcatcgtcaggcctctgagcccaagctaagccatcatatcccctgtgacctgcacgtatacatccagatggcctgaagcaagtgaagaatcataaaagaaatgaaaatggacagttcctgccttaactgatgacattaccttgtgaaattccttctcctggctcagaagctcccccactgagcaccttgtgaccaccgcccctgcccgccagagaacaaccccctttgactgtaactttccactacctacccaaatcctataaagaggccccacacctatgtcccttcactgactctcttttcggactcagcccacctgcacccaggtgattaaagcgctttattgctcacacaaagcctgtttggtggtctcttcacacagacgtgcgtgacaaccatgtggtggttgtgacttaaaaccggatggaggcctgcagcaaagtttgctacagaccatacagcacacaaagcacaccagattggctacttaagatcaagctcacaaatttttcctacaataaaaactctacagaagatataaacagtgatgttcatcattcctggatcaacagaatgtcctccaaagagaaaaaaaagaaaacacgcttaaaagtcaactgctggctatgtgcgtggctcatgcctgtaatcccagcactttgggaggccaaggtgggtggctcacctgaggtcaggagtttgagaccagcctggccaacatggcaaaaccctgtctgtctgtactaaaaatacaaaaattagccaggcgtggtgatgcacgcctgtatcccagctactcatggaggctgaggcaggagaatcacttgaactcgggaagcagaggttgcagtgagccaagatcacaccactgcactccagcctaggtaacataagtgaaactctatctcaaaaaaaaaaaaaagaaaagtcaaccctgacaaggtagaaaaaaaagaaaagatgcctggggaagaacgtcttattcttatgcaaatgggcttctctaccagagagagaaacttcattgctccctaataaagtgggatcttttggctgggggagggcaagcctctatggatgcatggcagggagtgctggccagcctggcatcgggcaccctgtaaccatggactccagccctagttgggagtggtgtggggaagctgccattccctggtccatcctccacatacctgcagccattggggtggggtggggtgcactctcaaaggaggtctgaagagaaaaaggcttagaaataaaaggaaagaaggtttttgagtttgtatggtactcacccttcctcaagccccatgtctggaaaccaaaaatgttataggaaaaaaaccagtttcttgtaaaattaccaggaaatattaggttcacagacacatagaggggcgaggagcagaatttattaggcaaaaaggaagaagaaaacaactcaataaaatgagatggggtcctgctaacaagctctccacctcaccgattgaattccaggtccccatacaggaacaggagaggccaggaaactcctcctgcagacggtgtgaacttcctgaggctctgccccatcctcccagtgcataggccggtttgagattctctgaggactcatttttacttggctgtctcaatacataggcattagccttggcaactgacttctagaaatctgctatgcaattagagctttacaaacattaagcaaatattttatcatttaatctctgtggttttcttttcttttttttttcctttttcttgagagagactatctctgtcactcagggtggagcgcagtggcgtgatcacagctcattgcagcctcaacaatctaggctcaagcacttttgctacttcagcctctgagcagcagagaccccaggcatgtgccaccatgctcagctaatctcccatttttctttttgtagagataagctctccctatgtagcataggctggtctcgcatgtcattcacatagcccgtgaaaaagctggccctcctactttagccttttaatatgcaaaggcagggcgccatggatgttctacacacgtggagatatgtgggggtggccatgttgccaggaacatttggtgcaagggcaagaaggccacgagggaatcaccaaattgggtggaccaagtttctaagggcctgcatttgtatatcaaaagttgccagcctggctctaagagctggggctttaaaagaaacttttccagagatactttaaaaaatgaaaacttcccaaggacctattttcctctaatccacgtaaaataatttcttaataactcctaccacacagggctaggattacaggcatgagccactacatgcagacagaggttttatttttatatcaaaatataaaaatagcattagccaggcacggtggctcacgcctgtaatcccagcactttgggagcccaaggcaggcagttcatgaggtcaggagttcctagaccagcctgaccaatatggtgaaatcccgtctctactaaaaatacaaaattagtcaggcatggtggcacacacctgtaatctcagctactcaggagggtgaggcaggagaattgcttgaacctgggaggcagaaatggcagtaagccaaaattgtgccactgcactccagcctgggggacagagcaagacaccatctcaaaaaaaaaaggaaaaaaaaaaaaagaaaaaattagctgggtgtggtggcacatgcctgtaatcctagctactctggaggctgaggcagaagaatcacttgaacctggaaggcggaggtttcagtgagccaagattgcaccattgtactccagtctgggtaacaagagctaaactccatctcaaaaaaacaaaacacaacaaaaaaaaagaaagcaaattcaaataaataaaaataacaaaatatcatatagtatagataatatgaccagaaagaaaaaaaaaagcttagctttcctgactttaagctgcattagtactatagtactaatagaatatccttagtgaagactattctatttccataaaaaattcaacataagataattttcaggttttagaaattgatgaataacataatatagaaaggcagcaatgtgttcccatgatgtagtattgttgtgggacaatcagagatgggagagaccgaacagagttcaggaaagcctttattaaggtgatcacctggctcagtaggactagagtccaggaaagtgagccccagacaaagaaagcagccaccttttaagcagtcagcagccgggagctacgtgatgcaggaagcatacttacagaagtgagaacagaggcagttgatcagtcttttacatttatctatactatgtgttccacatccttgggaaaccatgtttctgtaacatatgcttaccaaccttgtaactgcagctgcgctagggaggtgaagcagaaactcactgagcctcaaggaatgtgaaactggtgagtacagataaggctctctgagcacagaaggaaaaacaggcagttagtattcttctctaacttagactttgttggggggctacactacacttagcttttgaaggaaaaaataaaaatttcttggttgtctttgattacacttgtaaaattcatgattccttctttagtattacttgaaataaaaactgagcaaatacagcaaaatacattttaaagttaatctcatgtcaaaataggtacagaagttctaataaaataataaatggaatccagaaatgtattaaaaataatatgttgtatatatatgtattgtattagaatgtcaatgcaattaaagatggaaaatgtgttgtttaattacatgaaaagtttaaaaagtgaccattctctatgattctgaaaacaggaattgtctcaacagatgtgttttcgcatctacatttacctacacatattttatatgacatctatctattctttatccattcatagaatgtataaaaaaagaatggatttaaaatgaatagcatctgataaaagaagcacttaaatgtattatgaaagttactttattacatagtgtccagatacttatatgttccctcagaaattataaaataagattgtatcaactcttccaggtaatttaagaaaatattttaaaaatatgtggataaggttattagctgaaaataagagagaatacattcatttgcacagataaagagaacactttttaaatacaaaaagtatcacgaaaaatgcagataatgtacattatctaaaaaatactaaatctaaaaaacaactcagtgctataagatttatgcagcatagagaaattatatataaatatcaactgtttatatttacttttttgagagagggtctcactccattacccaggctggagtgcagtggcttgatcatggctcactgcagcgtcaactccctgggctcaggtgattctcccatcccagcctcttaattagctgacactacaggtgtatgataccacacccagctagttttatgtacttttttgtagaaatgaggtttcgccgtgtttcccaggctgaactcgaactcctgagctcaagcaacccgcctgcctaggcttcccaaagtgctgaaactacaggcattagcaaccatgccctgcctgaatatggatattttaaataacttcagtgtgaaatactaaacacagttcaaaatgtattttacttatatgcaatgagttgaacaaacattcaagagctaaatgatgagtaaatataaggcccaacaaccaggggcatgataatgcaaacagctaatgtgtggagcactcttgctttgccagcctgtgtttcaaagcattttaaatatttttgctcattaaatcctcatcagcaaaaactctgtaagtttaattattccccatgtcacagacaagtgactgaaggaaaaaaaattcagggacttgtccaaggccacccatatagggagtggttgagctaaggtgtgctctgacttactcctctctgcttctcttgaatagaaagtgctataattcattgattaaaaaaactactcttggccggacatggtggcacatgcctataatcctagcactttgggaggctgaggcaggtggatcacaaggtcaagagatcaagatcatcctggccaacatggtgaaaccctgtctctactaaaaatacaaaaattagctgggtgtggtggcacatgcctgtagtctcagctacttgggaggctgaggcagaagaattgcttgaacccgggaggtggaggttgcagtgagccaagatcgtgccactgcactccagctgcgtgatggagcaagactctgtcaaaaacaaaaacaaaaaaactactctttgagcacctgccatggaccaagcactgtgattggcactaggaacatagtggtaaactagacacagctcccaggagcaaagacataaagaagtaaacaacaaacctcaagatcatttcagagaatgtgaagtgccaggacatgctgctgctataaagaatgtgtgtgcacagggctaatgggggtgagctctagttaaaatgaggtgggtagaacaaagcttcccagggagagccagagctgagccaggcctggtggctcctatcagtgtgagaatgtggttatattctgtctcagtttttttgtatgcagcccttaaaatctttggaatgtctgatatgagaaatgtctttcgcatgctaatgagattactgctttccaggggcttctggacagcctcagaatggggattggttgccagaaaaaccaatcctgtaatacagagttaaaactttcagcttaaccccttatctcctgggatgttagaggagctatcttgcctttgtaaaagtaaaaatagtaccttataccatttaaatgaatagataaattgttcaaaaaaggggcatatcattaaaaagctcctctgccccagcctgactacttaaagtacccattaggggaagtttttttggtatccttctgaaattgctttctgtctttccatgcataccatccttaggaaagggcacacttttttgagacggagtcttgctctgtctcccaggctggagtgcagtggcccgatctcggctgactacaacctccacctcccgagttccagtgattctcccacctcagcctcccaagtagttgggattataggcacccaccaccacaccaagctaattttttgtatttttagtagagatggggtttcaccatgtcagccaggctggtcttgaactcctgacctcaagtgatctgcccatctctcccaaagtgctgggattataggcatgagccaccatgctcggcctgggcacactcttaaaccaatctgtaatctctgttcctgaggttttagtaacctgatatttctctcctgttggagacaaccctgaaaatgagttttcacctcagagaacagaccaacaaaaggtcaggtgagcttaaaaaagctggcggggggatttgggtccagaaagggcaggctggccatacattcaggggcatcagtgtgactgtctttgcaattaggagccaggccccacagagcttcccactgcatgtgtgtttgacctatgctgggccctgatgttgattcgtttccttcactgagcaggtggctcatagttgggctattatacccaggagaatgttccaggccagcccctagttaacttaaaataatcaaaaagtttagaatcaaatttgaaacaaatttattcagggtcgcatattgaggatcacctccataaggatagatttaaattgccctgaatatatattctgattagcagccattacaagcaggtatttctatgaaaatgagaaggcagttctaaagtggtttaccaaaaatttacattaaaatacataagctattgattagctatttttctttattttacaaatttcagaaaaaagaaataatgggtgagacagccagtcagaaacacaatgtaaggtcctctgaacaggctacaccatggtggagccattgcaacctctgtgacccacatgtacaggcctcctggagtcacaaagcctgtagcaacaggagaaccactaaagaagaagaaacagctagttcctgccttaactgattaaccaaccttgcaacattccaccattgtgatatgttgctgcccttccctaactaatcaatcgactttgtgatatcgtgccttgtaacctccccctacctcgtgactatgcaccttgtgacattcttcccctgcctgaaaaaactgccctaactgtaactttccactacctaccccaaacctataaaaccacttccactgacaccaccctttgctgactccctttttggactcagctcattcgcacctgagtgaataaacagccttgttgctcacagtaagcctgctaaggtggtctcttatacagatgcacataacacataacatctttttttttttttttttttttgagatggagtcttactctgtcaccaggctggagtgcaatggcactttttcagctcactgcaacctctgccttccgggttcatgccattctcctgcctcagcctcctgagtagctgggactacaggcacctgccaccacacctggctaatttttgtatttttagtagagatggggtttcaccctgttggccaggatggtctcgatctcttgacctcatgatccacccggctcggcctcccaaagtgctgggattacaggcatgaaccactgtgcccagcaacacataatagctttaaacaattgaccctgggcacaggtgtggagtgagactgaagtcctagactctcatctctctgggcttgatgaattgtgcagaacgcacaaagctgagactgccatgagctatttttcttctctcacccccttgcttaggtcacatgaactataaagaggaaacaaattcaaattagagacttgtcaacccacaaaaataatgcctgaagatgccttccaggaatctggctcctacctcctttccccaccctgccatcaaccatcaactccccttacacacacacaccctggatcacaagaaagacaaaaccatttcaccagccactgagagaggagccacagaaggacccagaacccctgcatggccaccttggacaagcctagaatatactgacagccattgttagcatccaggagctatttattcccatcttcgcactacagtaaagaattttgttttttgagacagagtctcactctgcccggactggtgttcagtggcttgatctcagttcattgcaacctctgcctccaagattcaagagattctcctccctcagccccccttgtagctgggattacaggcacctgccaccatgcctaatttttgtattttttttttttttagtagagacaggatatcgtcatgttggccaggctgatctcgaactcctgacctcaggtgatctgccaaccttggcctcccaaagtgctgggattacaggtgtgagccgctcgaaagcagcctggccaacattgcgaaaccccatctctactaaaaatacaaaaattagccaggtatggtggtgcgtgcctgtaatcccagctactaggggtttgaggcaggaggatcacttgaactcgagaggtggaggttgcagtgacccgatatcctgccattgcactccagcctgggcaacagagcgagactctgtctcaaaaacgacaaaaacaacaacaacaaaactttaaacagtcacaaggaagattgtctagactgtctagattccctagactagctggaagctggtgcttgcaacatcccgtatcccccaggagctcactgctgcagtctcaggtacacacctgcccatgtgccattcaaatgaaacaactgttatcaaggaaccagagttcctgcaatggtcgtgcttcagtctggggtgcattagtgaccagctagcagggtcttgcctgtgtaaaccaaaagttatctgagacaggtctcaatgtagaaagcttattttcccaaagttaagaatgagcccatgacacagcctcaggaggtcctggtgacatgtacccaaggtggtcgggatatagcttgcttttatgcattttaagaagacaaattagctgggcttggtggcatatgcctgtagtcccagctgctcagaggctgagacaggaaaattgcttgaacccgggaggtggaggctgcagtgagccaagatcacaccactgcactccagcctgggtgacagagtgagactgtttcaaaaaaaaaaagaagacataagacatcaatcaatatgtataagatgtacattggtttcgcctgttaaggggggtcagcttgagattggggctgccaggtcataagtaaataaaagacaaaaggataaattcttttgagtccttgatcagccttccactgaatacaaaatttagtctggctcagtgaatctgcatttctaaattaacaataggggccaggcacagtggctcacatctgtaatcccagcactttgggaggctgaggtgggtggatcacttgaggtcaggagttcaagaccagcctggccaacatggtgaaaccctgtctcctctaaaaacacaaaaattaattgggcatggtggcgggcacctgtaatcccagctacttgggggctgagacaggagaatcacttgaacctgagaggtggaggttgcagtgaggtgagatcatgccactgcactccagcctggatgatagagcgagactctgtctcaaaaatgtaaaataaattagcaatagggcaggggaggcaatcagatattcatatgtctcaggcaagtctcagagggatgactttgagttctgtctgtcatttgttcacacaagaaatgtctgtgggcaaattgtgaagaaggtatgtagcttttatttatctttgtagctatcttatttagaaataaaatggaaggcagatttgcccgacatagttctcagattgacttttccagtggcttagtaattttcacgtcacgagatttattttcctttcacagcagggaccccttttattatcaagtgtatctgtttaaactagacagactaaaacaagatgtctattcataagttacaaatggaggttaatagaaaactcataaacacaaatataactatcctacatctttcaaaatagcccatcctaattcttccatttcttgttcactataattcatgtagatttttttcataattttatagtggatctcaatatcagaggtgttcaaaccagagcaactccatctcaaaaagtagctgggtaaaatgaggctgagacctactgggctgcatccccaggttaggcattcatagttacaggatgagataggagatcagcacaagatacactgcacttagcaatatgtcacaatcttccctgtgagcagggcacaggcagaatagaggagtcacatatttaggtcatggatgcagagatttgtcacaaaggccctgtgggtggggtcaagaaaggagcttcccatcccctaggtgttgggcccagcaatatatcacaatacccaatacacaggaaaaaggtagagtcatatcacctaggtgctcggtccagtgatatttcacaactgttctttgtgtggcagattctagtcaaaaaaggagagtcacaacacttaagtgatgaaaaatatgtcataacacctttctgaacagagaccatgcaggagactcatactacctaggtgttggacccagccatatttcacaatacacaatgtgtgcagagaccaggcacaaaaaaaaacaaaaacaaaaataagtcacgccagacgtggtggctcacgcctgtaatcccagcactttgggaggctgaggcaggcagatcatgaggtcaggagattgagaccatcctggccaacatggtgaaaccccgtctctactaaaaatacaaaaattaggccaggcgcggtggctcacgcctgtaatccctacactttgggaggccgaggtgggtggatcaccttaggtcaggagttcgagaccagcatgaccaacatggtgaaaccccatctctagtaaaaatacaaaattagccaggtgtggtggcacatgcctgtaatcccagttacttgggaggctgaggcaggagaattgcttgaacccaggaggcagagattgcagtgaggcaagatcatgccaatacactctagcctggtgacagagtgagactctgtctcaaaattaaaaataaaaaaagtcccatgttggggccaggtgcggtggctcacccctgtaatcccagcacttgggaggttgaggcaggaggatcacctgaggtcaggagttcgagaccaccctggccaacatggtgaaactccatctctactaaaaatacaaaaattagccaggcatggttgtgtgtgcctgtaatcccagctactcaggaggctgaggcaggagaatcactttaatccaggaggcggaggtttcagtgagcagagacatgccattgcactctagcctgggcaacacagtgagactccgtctaaaaaaaaaaaaaggtcacattttgtgcagagcccaaacagtagaagagagtcatatcacctaagttctgggtccagaaatgtcacagtaccctctgagggaagacccctggcagaaaagtcacatcatctaggtgagaggctcagagatatgtcacaatgccccctgtgggtagggctcaggaagaagagaaagatcacataacctaagagctgggccgagctacatatcacaaccacccagtgggcagggccaaagcatgagaaaagagtcacatcacataggtgctaaaccaagtgatacatcacaatccccactgtggacaggtcccgggaagaagaggagtcacatcatctaggtaatgggcccagagatatgtaacaagaacccctttgaacaggaaccaggcagaagtattacgttccctgtgtgctgatcccggggataagtcactctcttttatgggagcgtggcaatagcagcaaaaaagagtcacataatctaggtgttgggcccagagatatgtcacaatctctcctataggaaaaacctaagtaaaagagtcacatcacatagatgatggattcacagatatgtcactatgcctgctgtgggcagagttcaggaagaaggctcatatcacctaggttctgagcctgacaatatgtcacaatgcatgatgaggaaagggccaaggcaaaaatgtaacatcaccttggtgtttggcccaacagtatgtcacaatctacactgtgagcagaacctaggtagaagggaagaggcatatcagctaggtgccaggcccagtgataggtaacaatcctttctgtgagcagggacctggtagaaagagagagtcacgttacccgggtaatgggtacacagataggtcataatgcttcctgtaggcaggacccagcaaggagagttacatcacctggatgttggacatagcaatatgtcacaatggcccatgaaggcagggcacaggcaggagagtcacataatcaagttgtagggcccagcaatatgtcacaatgccctctatgggcaataccgaggcaaaaatatggatcacacaacctaggtgttggattcagcaatgtgtcacaatccaatttgtggcctgcaaaccaggcaggtgagtcaaatcactcgggtgctgggcagaggtgtatgtcacaattatagttgcagaacaatgtagagataaaattaacaatcccacacatgtcccatttctaggtattagagtcaacacttttttttttttttgagatggggtcttgctctgtcaccgaggctggagtacaagtggcgcgatcttggctcactgcaacctccacctcctgggtttaagtgattctcctgcctcagtctcctgaatagctgggactacaggcacgcaccaccacgcctggctaatttttgtatttttagtagagatggggtttcaccatgttggccaggctggtctcgaactcctgaccttgtgatccacctgccttggcctcccaaagtgttgtgattacaggtgtgagccaccgcgcctggtgagtcaacaccttttgttatgttcagtctgagtacacgagtcacagtctcaacggttaactggatacactgatgagagcctcaattgttgctggggactgtgtccccttagtggggtcaaagctgcacacgtatgctgaatcttggtctgagagtcaccaacccacatttcaacaaaatccgtgtatgagagtcaattttccaacttttggctatgtccaggtgtgatattcagtacttcaatagctgtgttcatgtggaaagatgacaatctttatcgttggctgggtgtgcataggagtgtcacaatgtcgcttgtgcactgggccctgttacagaactctctgtactaactgagagctttatacaatatgcatgatagtcacaagttgttctgagacctttgttgtagtatggactcaattgtacctgtggacctaagcccatgtattagaatcaacatctctccaattggctgggtccagagagaagagtcctcagctgcctatgagctgggtttagaaatgagacactaacttaactgtggtcacataatcacatgtgacagtcacaatttttactgtggactgcattcacatgtgaaattaaggatctcttcagtgggctctgtccatgtgtgagggctacaagttatgaaagtcaacattgtttggatgttgggtgtaactacacaagtcacaatctcaatgtgcatggatccatgcataagagcctcaatctctctgcaaactccctctcactaaattatatcctcacaggcgtgctgaatcttggtctgtgagtcaccaacccccctgtggaccaggttcacatatgagagtcaattttgcaactttccatgtggtaggttgtgcatgagagaaacacagtctcacctgtgtgcctggttctgtgatgacgctctttgtaccatgcaaagacattgcacaatatatgaaagaatgaccatcctttatgacgttcttactacagaagactcaggagtttattcatttctgtaagtctagctacaagtggcagtatctctcctattggctgttttgtggcgtaagtgtcatcatcacaaccatgagctgtgctaaagtgtatgtcacaatccaacctgtgagtagaaagcaaacaggagagtatcgtcacgtgggtgctgggttaagaatatgtcacaatttttccaaggcagggaccaggcaggagagtcaaatcacctggttgcctggccagggttatgtcacaattccctcctgaaagcaagacacagacagcaaagtcacaccactctggtgagctgggcctagctatgtcagaattctctctgtaggcaaagtctgggcacaagggacacaccaccttgttgatgaacccagagatatgtcacaatcttctgtgtggacatagtgcagatagaagaggagtcacatctccaaagtaatggatgcacagatatgtcacaagacctcctatgggcagaacccaggcaagagtctttcacccatttggtttgacccagggatatgtcataatacccaaaatacaaggaacccaggtgaaaaaggagagtgatatcacctagatgctaggtccagtgatatctcacaatcccccctttttatagggttcaggtagaaaaggagagttacatcacttaggtgataaacaaaaagatatgtcctaattcccctattaacagggcccatgcaagagagtcacatcacctgggtgttgaacccaatcatatttcaatatacacagttttcttttcttttcttttccttttttttttgagatggagtttttgctcttgttgcccaggctggagtgcaatggcatgatcttggctcactgcaacctccgcctccagggttcaagcgattctcctgcctcagcctcctgagtagctggaattacaggcacgtgccaccaagcctggctaattttgtatttttaatagagatggggtttctccatgttggtcaggctggtctcgaactcctgacctcaggtgatctgcccgcctcggcctcccaaaatgctgggattacaggcatgagccactgcgcctggccaatatacacaattttcaacatacacaatataaaatttgtaaatttaaatatggctgggtccaacgtctaggtgatgtgatccccctgcatgggccctgctaagggaattagggcatatcattttgtttgtcacctaagtgatgtgactcttcctttctacctgaaccctgtagcaggagaggagagtcacatcactaaggtgctggccccagtgataccttacaattcctccattggccgaacccaagcagtagaagagagtcacatcaccttgttgctaggtcaaaaaatatagcacaatattccctgaagaaaagaaaaaatgagcccatgaagcagagtcacatcatctaagagagggctccagagatatgtgaaaatgccccatgtgggtaaggttcatgaagaagagaggagtcacataacctaggaattgggactagttaaatgtcacaatcaccccagtggggggacccaggtatgagatgaaagtcacattatgaagatgctgagtcaagtgacatgtcacaatccccactatggacaggtctcagagacaaaaggagaggcacagcatctagtttatggacccagggacatgtcacaatgtcccctgtggatagggaccaggcagaaaaattacatcatctgtgtgctgaacccagtgataagtcactctcctttctgtggtcagggcccaggcaagagagaagagaaacatcacataggtgcttggcccagataggttacaatgtctcctagagaaaagctcttgtaaaagtagagagtaacatcaaatagatgataggtccaggaatatggcaaaattccccctgtaggcaaggtctaggaaggagattcacatcacctgagtgttagacccagcaatatgttacaatagcccatgtgggtagggcacagaaaggacaaacacattaccagggtgcagggaccagtgacatgtcacaatgccctctgtggcagcaccaagaaaaaagtacagatccacattatctacatgctgggttcaacgatgtgtcacaatcccacaatcccatctgtgtgctgggcccaggcaggagagtcaaatcactctgtttctgagaagcatgtgtcacaatcacacctgcagaaaggcccaggtatgagaagaacaattcctcacatgtacctgctctagttatgaaagtcaacactgtttggatgttgggtgtaaccacacaagtcacaatctcaatgtgcatggatccatgcataagagcctcaatctctctgcaaactctctctcctcaataaattacagcctcacaggtgtgcggaatcttggtctgtgagtcaccaacccccgttgtggaacaggtccacatatgagagtcaattttgcaactttccactgcctccgggtgtgagattcagaacttcagaatcttcagaacttcagaagtgggttgtgtttatgtaaaagggttgtgtttatgtaatatttactgttggctggttgtgcatacgggtgtcagaatgtcacctgtgtgctgggccatgtaaggttactcaatctgaggactttacacaatatgcatgagagtcacaatccactctgagacctttgtggtaccatggacccatgattatacctgtggctctaagctaaggaatgagaggcaacttctgtccaattggttgatccatataggagagtcctcaactgcctatgaactaggtttagaaattagtcatcatttcttttctggctggatgtttgcatatcacagtcacaatttcaaccgtggactgcatgtgcatgtgagattcagaacctcaccagggggctctgtccatattgaggtaacaatcataatggttggcagggtgttcatttaagaaacatgatctcagctatgttttcggcctgtcatgatgctctgtgccacctgagaactttttacaatatttaaaagtggtgggccaggtgcagtggctcatgcctgtaatcctagcactttgggaggcccaggcaggcagatcatgagttcaggagtttgagaccagcctggccaacatggcgaaactctgtctctactaaaaatacaaaaaattagccaggtgtggtggcaggcacctgtgatcctggctactcaggaggctgaggcaggagaatcacttgaaccaggaggtggaggttgcagcgagctgaggtgacgccactgcatgctagcctgggcgacagtgtgagactccatcttaaaaaaaaaaaaaaaagaaagaaaagaaaaaagaaaaaaaaaagagtggtgactctctatgacctttgcaaatagaggagactcgggattatgtttgtttttctaaggctagctaagagagggtgtatctcttttattatctggttcgaggtatgagaattattacagcaactgtaagtggggacaagacatatgtcacaattacatctctgggtagggagggggcaagagagtcacacctggggctagttcagagatatgtcacaatattttttaagggcaaggaccaagcaggagagtcatatcacctaggtgcttggcgagggatgtattaaaatctctgcctgtaagatgggcgcaggcagcaagtcacatcacctgggtgctgggcctagtgatatgttacaatgttttctttgggcatgatgcatatagatgagaagagtcacatttcataggtgacaaatgccaaaatatgtcacaagaccccctgtgggcagcgcccagataggagcctcccatttcctaatgtcaaacccagtgatatgtaacaatatgcaaaatatgtaagatccaggcaaaagatgaaagttacatcatctaggtgctaggtccagtgatacatgataatcctttttttggcaggttgcaggctaaagaagagtcacaacactcaggtgatgaatgaaaagataggtcatctactcttgtggtcaaggcttatgtagaagactcacatcactgggctgacagacccggctatatgtcacaatacaaaatctatgcagaacccagacaagagaaaagaatcccgtcatgtaggtgctgggcccagtgatacatcacaatccctttttggtcaaagtccaagtagtagaggaaaagtcgcatcacctaaatgctgcatccagcaacatatcacaataccccctgagaggagagtccaggcagaaaagtcacatcaccaaggttaaaggcccagagatatttcataatgttatctgtttgtagggctccagaaaaatataggaatcagataacataggagctgggcacacctatatagcacaatcaccacagtgggtagagcctaggcatgagagaagagtcacatgacataggtcctcagccaagtgatatgttacatttcccactgtggacagattcaggaaaaaaaaaaaaaggagaggtctatcattaggtaatcagattcagaaaaaaaaaagagagatctatcgtctaggtaatcggcccagagatatgtcacaatgaccacttgggcaaggaccaagcaaaagaatcacatcccctgtgtgctgaacccagcaataagtcactcttccttctgttagcatgacccaggcccaaagatatattacaatctaacctatgggcaaagcccagataaaagaggagagtcacataaaatagctgatgggctcagagatgtgtcaaaatattttcagtaagtggggtgggtccaggcagaaaactcacatcatctaggtgtagggcccagcaatacgtcacaatgtcttacatgggcaggaccaagaaaaaaaaagagtaatatccatttggtgctaggttcagcaatattccacagtctgtttttcaggaaaaactaagaaataaaagaagagtcacatcagctatatgctgtgaaaggtcaaaatccttcctgtgagcagacagcaggtaacagaagagtcacatcacctgtgtgattgatgcaacgtcattccaaaatgccccctgtaggccaggtgcaggcataaaagttacatcacctcattgttggacccagcaatatctcacaatggcccaagtgggcaaaccgcagacagaagaatcacataatgtcagtgcagagtcgggcaatatgtcacagtatcctctgcaggcaaaaccaagaaaaagattagagtaacatcagctaggtactgggcatagcaatatgctacaatttccctgtaagcaaagaccaggcagaagaagagaatcacatcacctggatgccgggcccagtcatatttcaacaatctttcctgtaataaagacccaggcaggagaaacacatcatctggttgctgaccacagcaatatgctacaatttttcctgtaggcagcgtgcaggcagaagaggagagtcacatctcctaggtgatgagtgcagaaatatgtcacaatgccccctataggaagtgcccaggtaagagattcccatcccttaggtgttgagcctagcactatgtcacaatacccaaatatgtgtggcctaagaaaaagaggagacttacatcacctagataggccagtgatgtttcacaatttctctgagcagagaccaggcaggagaagagagtaacatcatcatggtgataggcattcagttatgtcacaaagatgcctcctggcagggcccaggaagataatgttacatcacctgggtgttggacccagcaatatgtaacaatgtctaatgtgacatattttgccaaaatatggcacaaaatacagggcacaggtggcagagtcacataacaggggtgcaggatccagcaatatctgacaatacccaaaatttgtggggtcccaaaaatagaggagagtcacatcacctaggggctggctccagtgatatatcacaatctcacctttgggctatgaccaggtagaaaagtcaagtcactcaggttctgattagaagtgtatgtcacaatcacatctgcagaaaggtccagtgatgaattaacagtcctgcacaggtcccagttccaggtatgagagtccccacattctctatgttgggtctaagtatgatagtgacaatctcaccaataaagtggatccatgtatgagattctacatacctcctgtgaactgtattcgctgtggccttaagcccaggtatgggagtcaacatgtccccagttggctgggggacatgttgactcccatacctgggcttagatagatagaatactcacgggttcagatagaagaattctcacctgcctatgaactggatttagaaatgagtcgtcatgccaggctccgtggctcatgcctgtaatcccagcactttgggaggctgatgcaggtgggtcacctgaggtcaggagcttgagaccagcctggccaacatgatgaaaccccatctctactaaaaatacaaaaaattagccgggcatggtggtgggcgcctgaaatcccagctacttcggaggctgaggcaggagaatcgccttaacccaggagatggaggttgcagtgagccaagataatgccattgcactccagcctgggcaacaagaatgaaactgcatcccaaaaaaaagaaagaaaaaagtcataattccaactctggctggatgttcatgtatgacagtcacaatttcaactgtggaccgtgttcgtgtgtgagattcgagacctcaccagtgggctctggccacgtgtgagggtgacaattttaatagttgctggggtatgcatatgagaaacacaatctcacctgtgttctgaaccctggaatggcaatctctgtacaattagagatttatatagtatgcaagaaagtggatattctctataacctttgtaaaagaaggagagccagcattttactcattattttaagcctagcaataagaaacagcatctctcctactgactggtttgaggtatgaaagccaccgcactcagcatggtaaatcatttctaaatccagttcatagccggtgagaattcttctatctgaacccgtgaggtatgaggtatgagagtcatcatcacacctgtgagctgggccaaattattttaaaatctcacctgtgaatatggagagacaagagtcacaacacctgggtttttggccaggaatacatctcaatcttttcttacagcagggaccacacaggagtgtcacatcaactgaatactcagccaggaatatgttacgactttctcctgaaagcaggacactgacagtagagtcgtatcacctgggtgctgagcccagcaataggtaacaatgctctctgtggtcaaggcccaggtaggagagacacctggtacctgggcctagtgacaattcacaatttttcctgtgggcagagtgcaggcaaaaatggagagtcacatctcctaggtgattgatgaagagatatgtcacaaggccctctctagacagggcccaggcaggagcctctgattttataggtgttcagcctagtaacatgtcctaacatgtgaaatattcagggcacgggcaaaagagaagagtcacataacctgagtgcagggcttagcagtatgtcataatccaccctgtgggcagcaccaaggctggaagagaaagtcatatcttcaaggtgcagagtcaagcgatatgtcacaatcttatctgtggactgggtcaaggcaggaaactcaaatcactaaggtgcttagcagatgcacacaatcacacctgcaggaaagtccaggaatgagattagaaattccatacatgtccaggttctaggtatgagagtcaacacctcctggatgttggatctatttatctattttgtttttgcttttgtttttttgagatgaagtctcactcttgtcccccaggctgggatgcaatggtgtgatctcggctcactgcaacctctgcctcccaggttcaagcgattctcctgtgtcagcctcccgagtagctgggattacaggtgcctgccaccacgcgcggctaatttttgtatttttagtagagatgggggtttcaccatgttggccaggatggtcttgaactcctgacctccggtgatccgcctgcgttggcctttcaaagtgctgggattacaggcgtgagccactgcgcccagccttggatgttggatctaagtgtgtgagtcacagtctcaatggttgacagaatttttgcaagacagccacagtttattctgcagacttgtcctttcagtgcagttacagcctcacatgtgtgctgaatcttggtctgagagtcactagcccacctgtggagcagatccacatatgagagtcaattctctaacttttgacagcctccatgtgtgatatttagaacctcaacagtgggatgtatttttgtggagaatgacaatctttactgttgcctgggtgtacatttgagaaacactatctcacctgtgtgctgtgttctcttatgacactctctgtgtcacctgaaggctttatacaatatgcaagaatggtgatcctctgtgaccttcatacaggaaggagatccagagtcttccctgtggttctacgtccagatatgacagtcaacatctctccaattggttgagtccagataggagagtcctcaccttcctacaagctgggtttagaaatgagtcaccatcccaactgtggccagatgttcacttatgacagtgaaaattccaactgtgaacggcattcacgtgtgattcaggacctcaccagtgggctctgtccatgtgtgaggataacaattctgaaggttagtggggtctgcataggacaaacataatctcacctgtgtgctgggtcttgttatgacattctctgtaacatactaggtctttatagatgtgagaaattggtaattctctatgacttttgtacagaaaaaagactttgttattttcctaagcctacctaggggcaacattatctctcctattgccaccttcgaggtatgacagtcatcattacatctttgttcttggccacaatatatgtgggtaaagagcaagcataagagtgacattaactgtgtgctggaccaggggtatgtcacaatcttccctgagggcatggaccaggaaggagagtcacatcacggggcactcagccaaggatgttacaatttcctcctaaaagcaggacacaggcagaagagtaagatcacctggatgctgggccaggatttagtcacaaggctcactgtgggtgaggcccagagaggacagacacaatacctggttgctgggcctaatgattgtcacaatcttccgagtgggcagaatgcagaagtagacagtttcatctcctgggtgatggatacagaaatatgtcacaaggccccctgtaggaagggctcagtcagaaaccttccaacccctaggtatttgttctaatgatatgtcacaacatccaaaatatgaagatctcaggcaaatgaggagagtcatatcgcctaggtgctggacccagtgatctgtcacaatcttttcttttggcaggcctcaagcagaagggaagagtcacaccacccaggtaataaatacaaagatgtgtttaatatatctgtgggagggcccatcacctcagtgttggacacagagatgtgttgcaatacacaacgtatacagggcccaggcagcagaggagagtcacatcacctaggttctcagttcagcaatatttcacaataccccctgaggagaaggcctaggcaaaaatgtcatattatctaggtaaaaggctagggatatgtcacaatgccttctgtgggtagggctcataaacaagaggaaagacataacctagatatggggctcagctttatgttccaatcaccccactgaaaagggcccaagaatgaaagaagagtcatatcacaattcccactgtagacaaaccccagaagaggagagtcacatcatgtagaaaaaagaaggcatttacctgggctttgcccataggagaaattgcaatgggtcaagagatatgttacaatgcttcctgtggtcagggttcaggcagaaaactcacataatcttggtgctggacccagcagtatgtttcagtgttttctaagggcacagccagagcaaagaagtaacatcaccttagggttagatgccacaatctcatttgtgggcagaaagtaccccctgtgagtagagaaaagggaggaaaaaaaggcacattccctcagtgattggtgaagatatatattacaatgacttctgtagacagagtccagaatgaagttacatcacctgagtgttggactcagccatgtgtcacaataacccatgtggaaaggacacaagtaagagagtcacataacctaggcctaacaatatgttacagtacacctgtgggcagcatcaagaagaggagactcacatcacctgggtgcatggcccagtgatatatcacaatgccccctgtgggttgtatcaaggcaaaatagagtgacattaccaagggtctgggtcccatgatatgtcactgtgagctgggcccaggtgagagagtcaaataactcagatgctgggcagagtcacatgtcacaatcagacctgtaagaaggtactgtggtgacattaaaaatgacattgtcagccaggtgcagtggctcacacttgtaatcccagcactttgggaggctgaggcaggtggatcacctgaggttaggagttcgagaccatcctggccaacacggcaaaaccccgtctctatcaaaaatacaaaaattagctggatgtggtggtgtgtgcctgcagtcccagctactagggaggctgaagcaggtgaatcacttgaacctgggaggtggaagttgcactgagccaagatcgtgccactgcactccaggttgggtggcagagcaagactccgtctcaaaaaaaaaaaaaaaaaaaaaaagaaagggctaggcacggtgtttcatgcctgtaatcccagcatttgagaggccgaggcgggtggatcatgaaatcaggagttcaagaccagcctgcccaagatggtgaaacctcatctctactaaaaatccataaaaatttgcctggcgtggtggcatgcacctataattccagctacttgggaggctgaggcagagaatcacttgaacccaggaggtggagtttgcagtgagccgagattgtgccaccgcactccagactgggcaacagagcaagactccatctcaaaagaaaaaaatatgacattgtcttgaatcaaggaatgagagtcaacacctcctacatgttgggtttaagtacaagaaatcacaatctcagtggtggactggatttgccaatgagcctcaatttctcttgcaaactctgtgccttagtgaagttacagccacaaaggtgtgctgaatcttggttaaagagttaccaacctggccaggtgcgatggcttacgcctgtaattgcagcactttgggaggccaaggcgggcagatcacgaggtcaggagattgagaccatcctgactaacacggtgaaaccctgcctctattaaaaatacaaaaaattagctgggcgtggtagcaggcacctgtagtcccagctacttgggaggctgaggcaggagaatggcatgaacccgggaggcggagcttgcagtgagccgagattgggccactgcactccagcctgggcgacagagcaagactctgtctcaaaaaaaaaagtcatcaacccaactgtggacagtatccatgagtgagagtccattttccaacattcaattgcctccaaatgtgaaattcagaacctcagaagtgggttgcgttcatttaagtgaatgatttgctgttggctaggtgtgaatatgagtgtcacaatctcacctgtgtgcttgtccctgtcaggacacactctgtaccacttgagggctttatatggtatgcatgagttgcaatctgctctgagacttttgtgctcctatggacccatgatcttatgtggccctaagtctaggtatgagcgtcaacatctctccaattggctgggtccagagaggagagtcctcacctgcctatgagctgggtttagaaatgagtcaccatctcaactgtggccagatgttcacatatgatagtcacaatttcaactatgtactgcatctgcgcgtgagaatcatgaactcatcagtgggttctgtctgtgtgtgagagtggtaattctaaaaattggcagagtgtgcttacaagaaacacaatctaacctgtttgctatgtcctcatcaccctctgtaccatccaagagctttatacaatatatgagagagtagtaattatttataaccttcatatagagaggagacccaggattttacccctttttctaagcctagctgtgagagacagtatctcttcaattggctagtacaaagtcttagagtcatcatcacacctgtgatctgggccaagatatatgttaccaaccaacctgttagcagaaagcatccaggagaatcacatctcctgggtgctggaccaatgatataaaaaatccttccctgagggcagtgaccaggcaggagaatcacatcacctggtttctcaactagtgataggttaccatttcttcctgaaagtaatgcacatggaggagacacacatcacctggtggctggaccctgcaatatgtcacaatctttcctgtgggcaggtagaaaaggagtcacatcttttatgtaatggatgcagataaatgtcacaaaaacccttgcagacagggctgaggcaggagcctcccatctttcaggtgtttggcccagttaaatgtcacaatacccaaaaatgtggttcgcaggcagaagagaagagtcacattgcctaagtgctagttccagtgatatgtctcaatctttccctttggcagggtccagggtgaagagaggattcacacagcctaagtgatgaaggaaaatatatgtcctaatatgcccaggagcagggcctatatgagacagttgcatcagctgtatgttgaacccagtgatatgtcaaaacatacaatttatgcagggcccaggcagaagagagtgtcataacctaggtgtcagtcccagtgatacatcacatacatcacaatgccttactttttgttgttgttttttttgttttgttttggcgaagtctcactctgtcaccacggcaacctccacctcttaggttcagcgtccagggatatgtcccaatccctctttttgtcaaggcccagccataagtagagagtagcatcacctgggtgatgaaagaaaagatatgtcatcatacccctgcaggcaaagcccatgcaggagagtcacatcacctaggtgtggggcccaacgatatattaaaatctcttcttgggtatatcccaagcagtagaggagagtcacatcacctaggttctcagtccagcaatatgtcacaaggccccttgaggggaaggcccaggcaggagagtcacatcacttaggttaggggccaagagatgtgtcacaatgttccctgtaggaagggctcaagaagaagaggagagtaacatgacctaggggcttggtcaagttatgtgtcacaatcatacctgtgagcagggtctaggcatgagaggagagtcacatcaagtaagtactgggccacgtacatgatgtatcacaataacccatatagacaggtcccaggaagatatcacctaggtgctaggtccagaaatgcatcacaatgtctctcatgggcaaacaccaggaaaaaaagggaaggggataacatgaacaatctgatgggccaagagatatgtcacagtgcccactgtgggcagggtccagccaggagacgcacatcaccttggtgttggacccaggaatatgtcataatgccttctgagggcaggcccaaggtgcccagcaacatgttacaatctcttctgcaggcagaacctagaaagaagagttgagtcacaccagctaggtactgggctcagcaatatgtcacattagtttttgtgagaaggaactaggcaggagaagaaagtcacatcacctgggtgatgagcaaagagatatgtgacaatgactcctataggcagaacccaaacaaattagttacatcacctaggttttggacccagcaacatgtcacaatggcccatgttggcagagcacaggcaagagagtcacataacttgtaggggacagcagcgatatgtcacaatgctcactgtggacagtaccaaggcagaaaacagaacttccatcatctgggtgctaggcccagtgatatgtcacaatgtcccatgtgaaagcacagaagcaagagaatacagtcacatcacctagtttctggtccagcgatatgtcacaatttcatctgtgggctaaatccaggcaggagagtaaactatacagaggcatatggcacaatcacccttgcgtatacagaggcatatggcacaatcgtgcttgcaggaaggtccacagatgagatcaacaattctgtacatatcctgcttctgtgggcaccaggaagacaggagaggagactcacattacctgggagcaaggctctgagatatgttacaatgtcctttttgggtagcaccaaagcaggagaatagagttacgtcacctaggtgctgggtccagcagtgtggcacaatcctatctgtaggctgtgctggtgctaaagagtcacattactcaggtgcaaggcagaggtgtatgtcaaaatcacacctgcaggaaggacaggggatgagatgaacaatactgtacatatcccgattctaggtatgagagtcaacacctcctgtatgttggttctaagtacactagtcacagtctctgaaatgaactgaatcagtgcatgagaaactcagtccctcttaccactgtgcctccttagtggaatcacagcctcacaggtgggtcaaattttagtctgaaagtcaccaacttacctttgaactggatccacatatgagagtaaattttccaccttgcaactgcatctgtgtgagattcagaacctcaacagtaggctgtgttcatgtgagaagatgacaacatttactgtcggctgggtgtacatatgagtgtcaaaatctcaactgtactttgggcccagttagaacatgctctgtaccagccaagtgttttataaggtatgcataagagtcacagtcctttgtgactgggagacattcgtgctggtttggactcatgattgtgcctgtggctctatgcccagttataagagttaacttctctgcaatggctcagtccagatataagagttgtcccctgcctataagcttggcttactaaggagtcaccacctctgctgttgcctgatgttcacatacgacagtcacaatttcaactctgcactgcatccacctgtaagatttaagacctcaccagtgggctctgtccatggatgagagtgacaatcttttttatttttatttttatttttatttttatttttgagacagagtcttgctgcgtcacccaggctggagtgcagtggcaagaccttggctcactgcaaactccacctcccaggttcagccaattctcctgcttcagcctccggagtagctgggattacaggtgctcaccaccacgcccaggtaatttttgtattttagtagagacacggtttcaccatgttggccaggctggtcttgaactcgtgacctcaagtgatccacccacctcggcctcccaaagtgatgggattacaggcatgagccaccaccccggccgacggtcttaacaattggcaaagcgtgcatacaaaaaacacaattgcacctgtttgctgggccctgttatgacactatattacccgagggtttatacaatatgtgagagagtgtaattttctctgaccatcctaaagaggagagccaggattttatccattttcctaagcctagctatgagaaacagcatctcttctattggctagtttgaggcatgagagtcaacatcgcacctatgatctaaacaaagatatatgtcacagtctcacgtgtggatagggcatgcacaggagagttacgtcatctgggtgctgggccagggatatgtcacaatcttccctgagaacaggaatcaggcagaagtgttatcacctgggtggttggtcagagatacgttacaatttcctcctgaaagcagggcacactcagtagagtcacatcatttgggttctaggcccagtgatatgtcacaatgctccctgtgagcaaagctcaggcaggagaaacacatcacctgatttctgggccaaaagatatgtcacaatctctcctatgagcaaagccttggtataaaaaaagagtcacatcaaacagttgatgctcccaaagatatgccacaatgttctctgttatcagggttcatacaaacaacccatgtcaccttgttgctgggcccagcaatatgtcacaatgccttttgaggtccaggccaagacaaaacagtaatgtcacattgttgttaagctccacaagatgtcttaatatctctcgcaagcagaacttatgaagagtcacatttgtttggcactgggacaagtgagatgtcaaaattccccatgtgagcagggaccaggtaggaaatgagagtcacatcatctgggtgacgggtgaagagatatgtcatgatgttctagaacctaggcagtagaattacattaccaggtgttggacccagcaatatgtcacaattgcttatgtggtcggggcacaggcatgacagtcatataacctgggtgtaggcccagagatatgtcacaatgccccctatgggcagtgccaaggcaggagaggagactcacatcacctaagtgcagggcccagcgatatgtcacaatgtcctctgcaagcagcaccaatgcataagaatagagtcatatctcagatctgggttcagcaatattcactatcccatctgtgggctggtcccagggaagagagtcagattactcaggtgctggggagaggaaaatgtcacagttaaatctgcaggaaggtccagggatgatactagcaatcccatacatgtcatgattttaggtataggaggttaaccccttctatatgttgtgtctaagaacaggagttataatctcaacggtggactaaaattgtgcctgagcgcctcaactcctcctgtggactttgtctaattagtgaagtcacagcctcataggtgtgctgaatcttgctctgagtgtcatcaactcacctgtggactggatccacatctgagagtcaagtttccgacctttgactgcctatgggtgtgagattcagaacctcaaaagtgagctgtgttcctttttttttttttttttttgagacggagtctcgctctgtagcccaggctggagtgcagtggcacgatctcggctcactgcaacctccgccacccgggttcatgccattctcctgcctcagcctcccgagcagctgggactacaggcgtccaccaccatgcccagctaattttttgtatttttagtagagacggggtttcactgtgttagccaggatggtctcaatctcctgacctcgtgatccacccacctcggcctcccaaagtcctgggattacaggcgtgagccaccgcatccggccaaaagtgagctgtgttcatttgagaaaatgatgatgtatactgttgggagggtgtgcatacaactatcacaatctcctgtgttctgggccttgttaataccctctttaaaataccccaaagctttatacactatgaatgagaatgacaattaactctgagatcatgtttgtaaacacccatgaccatacctgtggccctaagcccagatatgagtgccatctctcctattggctgggtccagacagtagagtcctcatctgcttatgttctgggtttagaaatgtgtcaccattccaactgtagctggaggctcacatatgacagccacaattccaagtgtggactgtgtttgcatgggaaattcaagacctcggcaatgggctctttccatgtgtgacggtgataatcctaatggttggtgaggtgcacatatgagaaacacaatttcatctgtttgccgtgccctgtgatgacactttctgtaacacctgaaggcattatatgataggtaggtgggtggcaatcctttataaccttcatacaaagaggagacccagaatgtcgtccatttttctaagtcgagctatgacagtatttcttctaatagctcatttgacgtatgagagtcatcattgcacttgtaagctgactacagtatatgtcacaattttacctgtaggtagggagctagcaggagagtcacatcacctggatttcagccaaggtatctcacaatcttccctgagggagggagccaagcaggagtgtcacatcacctgggtgctcagccagggatatgttacaattctctcctgaaagcacagcacaggcaacagactcacatcacctgggtgctgagctcagcactatgttacaatgctccctggggacaagacagaggcagaagagccacatcacctggtgtctgcttccagggatatgtcacaatctttcctgtgcaggccagggtaccggcaaatatgaaatgtcacacattctaggtcatggatgcagatatatgtcacaaggtccctgtgggcagagcccaggcaggagcatgcaatctcataggttttggacctagtaacgttttacaatatccaaaatatgcgaagcccaggcaaaacaagagagtcacatcacctaggtgctgggttcagtgatttgccacaattcccccttttggcagggtctagtcaaaagaggagaattatatcacctgggtgatgaatgaaaagatatgttataacatctctgtaagcagggcccatgcaggagattcacatcaccaaggtgttagaaacaatcacatgtcacaatacgcaatgtacaggaggaaccaggcaggagaggagagtcacatcccctaggtgttggacccagcaatatattacaatcccttcttgggaaaagcccaggaagtagaggaaagtcacattacctgggtactaggcccagtgatatgtctcaatgtcctctgtgaaaagcactaaggcaagagaagactcacatcacctaaatgctgggtccagcaatgtggcacaatcccatctgtacactgggcccaggcagaagagtcaaatcactcaggtgctgggcagaggtgtatgtcacaatcacatctgcatgaaggtcaaggtatgagattaacaatttaacacattttctagatctaggtatgacatataacacctcctggatgttgggtctaagaacatgagtcacaatctcaatgatggtctggatctgtgtgagaacctcaatccctcctgcaaactgtgtccccttagtggagtcacagactcacaggtgtgctggatcctggtctgagagacacctcccttatgaaagatagttacacatgtgatttgatttttcaagtatgtctgcctctgggtgagattcagaatctcaacagtgagctgtgtttatgtggaaggatgacagtctttactcttggcaggctatgcatatgagtgtcacaacctcccctgtgtgctgagttctgttaggacattctttgtacctcttgacaactttacacagtatgtgagagagtgttaattctttatgatcttcatacaaagaggagacccaagacattactcattttcctaatcctggctatgagagacagtatgtctgctattggttactttgaggtatgagagtcatcattgcacctgtaagctgggccaagatatgcatcacaatcccaccagtgaagagggactgagcagtagagtcacatcacctgggtttgggggcagtgatatgtcacaaacttctctgagggcagagaccaggcagcagtgtcacatcatctgggtgctgggcccagtgatatgttaaaatgttctttgtggtcaaggcccaagcaggaaaaacacatcacctgattgctgagaccaatgatttgtcacagccctcccagtggtcagggtgcaggcagaagaggggagttaaatctcctagattacggatgcagagatatgtcacaaggtcccctatgtgctgggcccaggcaggagcgttccatcccatggctgttgaactcagtgaaatgtcactatacccaaaaggtgccaggaacagggaaaataaaagggtcacatcacctaggtgatgaaaaagatatgtcgtaatactgtgggcagttcccatgtcataaagtcacatcaccttggtgttgaatccaggcatatgtcacaatacacaaagcatgcaggccttaagcagaagaggagagtcacatcacctaggcggtgggcccagcaatacatcacaattcctgcttggacaaagcccaatccatagaggagagtcacatcacctatgtactgggctcagcaatatgtcacactgtcctttgtggggagggcccatgcaagagagtcacatcacctaaatgatgggctcaaaaatatgtcaaaatgccctctgtgggtagggctcagaaaaaaaagaaaatcgcataacccaggggctgggtccagctatatgtaataaacaccctagtcggcagggcccatgcatgagagaagagtcacatcacctaggtgctgggttcagtgcaccatactgagaccttgtctctactaaagtaacaatacttttttggcatggcccaggcagaagaggagtgtcacatcacctaggtgattaatagaaaaatattttataatacctctatgggcagggcccatgcaggagagttgtgttatccaggtgttgaagccagtgacatgtctcaatacacaacgtatgtaggtcccaggctggagaggagagtcacctcatctaggttcttgacagagtgatatgacacaatccctttttgggtagagaccaaacagtagagaatagtcacatcacctagatgctgggctcatcaatatgttacaataccccgagaagagggtccaaacaaaagagttatatcatctaattgagggtctcagagatatgacacaatgccccctgtgggtagggctcaggaagaagtgtgcagtcacataaccttgaggctgggcccagctacatgtcaaaatcaccccagtgggcaaggcccaggcataaggacagagtcacttcatgtaagttctgggccaagcaatatgtcacattccccactgtggacaggtcccaggaaaaagagagtcatataatctcagtgatcagccaagatatatgttacagtgacttctgtgagccggaataagagtcatattacctgtgtgctgaactcatcaataagtcactctctcttcggtgggcaagccccaggcaggagaggggagacatcacctcggtgctgggcccaaagttatgtcacaatctctttttgggcaacatctaagagaggagagacacataatatagtcaaagggcccagagatatgtcacaatgcaccttgtaggcagggtccaggcaggagactcacatcacattggtgctgggcccagcaatataccaccatgccttctgagggcagtgccaaggcaaaagagtaatgtcacctggccgggtgcggtggctcacacctgtaaacccagcgctttggtaggctgagaggggctggatcacctaagttcgggtgttcgagaccagcctgaccaacatgcagaaacgtcatctttactaaaaatacaaaaacaaacaaaccaacaaaccaacacaatatcaccttagtattaggctcactgacatgtcacaatatcccctgcaagcagaacctaggacaaggaggagagacatgttagctaggtgtgcacccagtgatatgtcacaatctcttctgtgatcggggccaggcaggagagagagccgcattacctgtgtgatgggtgcaggtatatgacacaatgtcctctgtaggcagggcctaggcagtagagttatatcacctgggtgttggacccagcaatatgtcacaatgacccacatgcacagggcacaggcaggagagtcacataacgtatgtgtgggacccagcgatatgacacaatgccccccgtggaagaaccaaggcaggagagaagattcacaccacctgggtacaagacccagtgatgtcacaatgtcccctgtgtgcagtgccaaggcagtagaataatcacatcacctcagtgttgggtccagtgatatgtcacaatctcttctgtgggctgggccagggctggagcaccaactcactctggtgctgggtaaagtcatatgtcataatcacactgtcaggaatgttcagcggtgagattatgcatctggagtgggaagaagcaacacatcaaaaatatgaccagaccatccacggcggctcatgcctgtaatcccagcacattgggaggctaaggtgggaggatacgtggagcccaggagttcaagactaccctgggggctatatggcgagacatctttattaaaaaatgataattaaagtttaaaaagtaatatatataaccacagcctggacaacatactgagaccatgtctctactaaaaaaaatagatagatagatagatagatagatagatgatagatagataggtagatagatagagccaggcacggtggctcacgcctgtaattccagcactttgggggccaaggcctcactcaaaaagaaaaaaaaaagaagaaaaaagaaatctaaaacaacagcaacttcagtgtgcaggaaggagcaagagaaagacaaaagaaacagaaaaagaaagaaataaataaaaataaaacagcggccaggcgcggtggctcacgcctgtaatctcagcacttcgggaggccaacgcgggctgatcacctgaggtcgggagttcgacaccagcctgaccaacatggagaaacctcgtctctgctaaaaatacaaaattagccaagtgtggtggcacatgcctgtaatcccagctactcgggaggctgaggcccgagaaccgcttgaacccaaaaggcggaggttgcagtgagccgagatcgcgactttgcactccagcctgggtaacaagagcaaaactccgtctcaacaagcaaacaaacaaaaaacagcaactcaatgtactgtggaaacaaacttgaagtggggctaggaaaacaaaaaaaagaaaacaaaaacagaaagatcccctgagcctcagctactcggaggccgaaaagaaaggattgcctgggtgagcccgggaaggtggaggtcgcagtgagcagtaatcgcaccctctactggatcttagcggttctgcagccgaggagagccatctggtccgtcttaaatatttcaagctggtggccaagtcctacactcttggccgacatctggtggacccggcggccggactgagaagccagcaggtagaggcccagcggatccaccctacaggccaagggtggcgctcgcggcctgaagctgtttttctggcatctaagtcgccaaccttccttcccaccgcgcccccaacccccatctgctgatcgatgtgggcggtggaaagaggagcaagggctcaagcgcagggactgcccccccggtgaccatcccacccgcggggtgggagagggcagggacccagactgccacccccgggccctcacagccatacctgggatggggcctgccgggccacacccccggacacctgcaactgaaccatccataccatgcttccccagccctatcccagccggtggatcgagctgccaccacccccactcccaggaatgaggggaggagccaggaaccagaggggtgggaggccaagcaggggagccccccaacccaaggcacccaccacgcagcacgccgtccctttcggcgctcggaaagccctcgggcgaacccctcccgagcccacccctcccgggacctcagaagatggctcaggacggcccctgactctccatggggacttgggaataaactcggcaggcgcctcagacagtcgggaccagcgtgggcgtccctggccccctgcgtcaggcctggtgggtcctgcgggtcgggcctcggcagttgcagtgcgcttgggatcagccggggcagccccacactcggctcgggctgggagcgcggggacagcctcccaagccacagccctgcgcgcccgacctccgactcacaagggacgcgccagagctctggtcccattgagacagttcagctgaaggctgcgggccttcccgagctccgcccagctcacagcggggacggtccctccctcggcagctgccgctggagctccggaggacaagagaacttagagaggtggcctcagtggagcccgacaaccagcgcgaacgtcaacaagacagatcgagatggcaagggcagctcgtgggcgaaatggatccacccgaccccagaaatgatccccgatacgtggctctgcatagaccacgacagagtccagtcaaagacaacccgtgggtgtgggtgtttgcagatgcttggagatgcatctcagcgggagaaagaatgaccaggactcggtagtgggtggtttaggacacagggagatacagaatgaggagactgtcccagaatccacacaaagacggacagacgacgaacggaaggaaggaaataaaacagaaaaaaaaaaaagaaagagaagagagagaaaaaaaatgaagaaagagaaagaaatatcaaaagaaaaatagagaaaataatgaaaagaaaaagggaagatgaaaaaggaaggaaaaaggtggagagacacaaaaagaaaaaggaagaaatgaaggaaaaaaggaaagaagaaagagagaggggaaaaaaagaatacaaagaaaaaagaagaaaataaaagagggcagagcatggtggctcatgcctgtaattccaacactttgggaggctgaggtgggagaatcacttgagcctaggaggttgagaccagccctgacaacatagtgaggccctgcctctactaaaagttagccaggcatgatgccacattcctgtagtaggaaggaaggaaggcaggagaggaggaaaaaaagggaggaaggtaggaatgttgagagaaaggcaggaaggaagacaggagggaatgaaggaagttagggaccaggttctacaaggaggaaatgttaaaaagaaacagagaaaaagaaaggaagagagaaacacaggaagaaaaagggaaggacagtaagaaagagacagaaagggagaaattatgaaaatagaaagaaaagaaaaaaagtagaaagatgaaaatacatctctaaaagaataataggcggggcatcgtggctcatgcctgtaatcctagcactttgggaagtccaggtgggtggctcatgaagtcaagagatcaggaccatcctggccaacatggtgaaacctcatctctactaaaaatgcaaaaatttgctgggcatcgtggtgcgtgcctgcagtcccagctacttgggaggctgaggcaggagaatcacacatacacacaaaacctgctgcctcaggctttaaacacacacgttttctgtaatccaggctcatttgattgtgagggctgttgtcagaaatgttactaagagaggaatatgcataaattagatcacatttaaggttatgcttataatgccacttgagtgggaagcaagagagtggagttacaggcacccagctggggtttacccacaccaggttggttctttctctttttttttttttttgagacagagtatcactctgtcactcaggctggagtgcagaggcatgatttcagctcattgcaacctccgcctcctgggttagagcagttcttgtgcctcagcctccggagtagccggaattaaaggcacgtgctactatgtccggttaatatttgtatttttagtagagacagggtttcatcatattgaccagccttgccttgaactcctgacttcaagtgatctgaccgccttggcctcccaaagtgctggcattacaggtatgagccaccgtacccggccaaccaatgccagtttctaggctcatgagagtgtggcacaggtaaacatcacctgtcattggtgacagaagaaaaaaggctggagggaagaccaggtgggggagaggtggtaggctgtggggctagaccctgggcatgctggacctgttaggtcactgaacatctatctggctggccacctgccccttcacgtcagttgaggaaaggggattgggcagcattctccataagtcccactgtgctgtgaggatggaggagtgtctacaaattgccatcttagggtaggttttagtgtgagctggactctcttggagagccaatgagatgggaggaagacagtcccccaggtaaaccttagggacagagcctgtgaagtaagagggggtgtgtggaggtggcctgtccctatgagaaggggagtttaaaactattacaggctgggcactgtggctcacgcctgtaatcccagtactttgggagacagagacgggtggatcacttgaggtcaggagttcgacaccagcctggccatgacagcgaaaccccagctctactaaaaatacaaaaattagccaggcgctgtggcacgcgcctatagtcccagctacttgggaggctgaggcaggagaatcccttgaacctgggagagggaagttgcagtgagctgcaatggcgccactgcagtccagcctgagcgacagagtctcgctctgtcaaaaaaaaagaaaaaaaaagaaagaaagaaagaaaagaaaaagacatttgaattctagtatctgtcagttcctctgagccaactggaaaatagatgcctttcaccttgaagtttgtttttgcttgtttgtttttttgagacagagtctcgctctgttactatactggagggcagtggcctgatctcagctcactgcaacctctgcctccttcaagcgattctcctgcatcagcatcagcctccctagtagctgggactacatgcgcacgccaccacacccggctaatttttgtaattttagtagagatggggtttcaccatgttggccagtatggtctctatttctagacctcaagacccgcccgccacagcctcccaaagtgctggaattacaggcgtgagccaccaggcctggccaccttgaagttttaagtgacaaccaaggatagccaccagtgtcttggttatggaagcctcctacgtgcttcccgcccccagtttgatttgcaggctcctggttgtgttgcagtaaacacgctttcctctggccttgtccaatgaatacggttcacacagctaacagtacttcttgagaggggttaccatgtaaagctgagaataaactgggtttaggtaacgttgtgcctccttatcacctgagaggccattgttcctggttcattctgtaagtgtattagtgctgtcagacatctttggacaattcaaatgaaaaggggctgtggttttataaaggaaacaaatgctttagatgtgaaatccttcttttattctccacttctcttacgtgaaaatttttgttttatttatttatttttgagacagtgtctccctctgtcatccaggctggagtgcaatggtgcgatcttggctcactgcaacttctgcctcccgggttcaagcgattctcctgcctcagcctcccgagcagttgggattacaggagcccaccaccacgcccggctagtttttgtatttttactagagacggggtttcgccatgttggtcaggagggtgtcgaactcctgacctcaggtgatccgcccgcctctgcctctcaaagtgctgggatcacaggcgtgagccaccgccccccgacgcctcagctcatttgttaattagcagtaattgcccgggtcagtgacacctcctacttgagcctctttccctgtccataaaatgcactaatactggggtgggtgggattgggaggtgggtcctggagctccatccaatcagtggcactggtgtaggaaccgcccgatcaggcgcgcagttggagaggagggcgtggcttccggcatttggcggggtctttgtctctcgctcccgccagagcttgggatcggtcttcactgttccgcgtcctctacctgggaaccaccgacccccgcccggcgactttgtcacagactctgttgccctgtgatctgcaggtcctgggagacgcacagccaagatgccagggcaccctggaagctgtgaagtggtgcgtatgcggggttgggcatcccttgaggcgagagcgggctgtgaaacctgcaggaccggcctccccacagtccgctcccgggtccgccgacctcagtcctctctggcgcagctcggccccaggcgtctctggccgcaagatggcggctgggcccgcggccgggacccccagcgtctcgccgcgtccctgctgggcgccctgtctggacctccctgggcagctctgcgcccgcagccccgagtatttcccagagtgcttagggatgccaggcgggtcatcagggtagaatcccgactaggtgtgtgcgtgggaggagctgcgacccgtggggttcccaagctttcctgttattttttttttcttttctttttagacagtctcgctctgtcgctaaggtaaagtgcagtggtgtgacctcggtttctgtaagctccgtctcccagggtcaagcctcccaaagtgccgggattacagggttgagccaccgcgcctggcctaatatattaatttataagaaatgcattcgagttgggttttagattttttaaatttatgaacacaggggactagagccactttagtctaatttcctgctgtttaattattttaacactccacagaggactcgttttcctctgtgccttcctaatgtgtggcaagcagggctctaatccacttttttcccttagcctaactcaggcttgcagtaaaattataaatttccacttttgttcctacattctcaaatgtgggatatgagaccaacttcccctgtccagtttacgacactatcaactatttgtcctttattgtacattagagacacggtattttaattgttaatcatgattttacacagcagtggatggtggcaggtttttaaagatttgttttctgtctataaacatttcacatgagaaaaatgtagaaaataatcctctgtcactccactgtaaaaaataaaaataaaaattatctctgcctctcccacttttatcttccctaggtacacacaccttattagtacgtcttcgggttgaagttttgctttggagaaattacagggccctttacagcagccctctggtcttttcttggtcatgagtttcagaactgtcttaaccaacccaggatgcccgtagtgaccatatctcttggagtgtctaatgaatatcatcccctgggtcatttcttagagggcagcctgaggaatgggagtatagcctctcagaggagcaactgggtggtctgggcctgaggacagtctcctggtataccatttgtctaaaaagctacctcttagaacattaagatttttttggtcaaaggaatgcttaggcaccactggtgggagtttaaatcagttcacctattgtcgacagtgtggccattcctcagagacctagagaaagcaataccattcaacctagcaatccagttattgggtatatacccaaaataatataaatcattctactataaagacacgtgcatgtgtatattcattgcagcacaattcacaatagcaaagacatggagtcaagctgaatgcctatcaatgatagactcaataaagaaaatgtggtacatatacaccatgggatattgtgcagctataaaaaaaatgagatcatgtctttcggaggaatgtggatggagctgtaggctgttatccttagcaaagtaacacaggaacagaaaactaaataccacatattctcactttaaagtgaaagttgaatgatgggaacacatggacacagaggggaacaatccatactggggtctattggaaggaggagggagaggaacaaaaaaagtaattaatgggtactaggtttcatacctgggtgatgaaataatcttcacaacaaacccccataacacacctatgtaaaaaatgtgcataggtaaaaatgtgtctcaaactcctgacctcaggtgatctgcccgccttggcctcccaatgtgctgggattacaggtgtaggttttttaaaaatttaggtagcttttcccataattccctaagagctttttttttttttttttttttttttttttttgagatggcgtttcactctgtcacccaggctggagtgcagtagcagtgtcttggctcactgcaacctccaactcctgggttaaagcaatcctcctgccttagcctcccgagtagctgggattataggcatgtgccagccaacacacccggctaatttttgtatttttagtagagatagggcttcatcatgttggccaggctggtcttgaactcctgatgtcaagtgatctgaccgcctcagcctcccaaagtgctggggttacaggcgtgaggcaccacgcccagtctgtgtggggaaaagagagatcagactgttactgtgtctgtgtagaaagaagtaggcataagagactccattttgctctgtactaagaaaaattcttctgccttgagatgctattaatctgtaaccctacccccaaccctgtgctcacagagacaagtgctgtgttaactcaaggtttaatggatttagggctatgcaggatgtgctttgttaaacaagtgcttaaaggcagtatgcttgttaaagtcatcaccagtctctaatctcaagtacccagggacacaatacactgctgaaggccgcagggacctctgcctaggaaagccaggtattgtccaaggtttttccccatgtgatagtctgagatatggcctcatgggaagggaaagacctgaccgtcccccagcctgacatgggtaaagggtctgtcctgaggaggattagtaaaagaggaagacctctttgcagttgagataagaggaaggcatctgtctccaggcatgtgtctttatagtagaatatagtagaatgatttatattattcccggagagtgatttatattattccctgggcaatggaatgtctcggtgtaaaacccgattgtatgttccatatactgagataggagaaaactgccttaaggctgcaggtgagacatgctggcggcactactctttaatgcaccagagatgtttatgtatgtgcacatcaaagtacagcaccttttctaaccttgtttatgacacagagatatttgttcacgtgttttcctgctgaccctctccccactattaccctattgtcctggaacatccccctctcttgagatggtagagataatgatcaataaatactgagggaactcagagaccggtgctggcacgggtcctccacatgctgagcgccgcccctgggcccacttttctttctctatactttgtctctgtgtctctttcttttctcagtctctcgtcccacccgacgagaaacacccacaggtgtggaggggcaggccaccccttcagtctgaagaataattttccactctgtgcaatttaagacaattatcttttttttttttgaaatggagttttgctcttgtgcccagactggagtgcagtggcacaatctcggctcactgcaacgtccatctcctgggttcaagcgattctcctgcctcagcctcctgagtagctgggattacaggcatgtgccatcatgcctggctaatttctgtatttttagtagagatggggatttcaccacgttggccaggctgatctcgaactcctgacctcaggtgatctgccctcctcagcctcccaaagtgctgggattacaggcgtgagccactgtacccggccctatctatgtatttttaatcaatgttgtccctgctttgtttatgacacaattttttctaggttttcaataaggcagagttttgctcttgttgcccagggtagagcgcagcggtgcgaccttggctcactgcaacctctgcctcccaggttcaagtgattctcctgcctcagccccctcagtagctaggattacaggcatgcgccaccacgcccagcttattttgtatttttagtgaagatgagggtttctccacgttggtcaggctggtctccaactcccgacctcaggtgatccgcccgccttggcctcccagagtgctggaattacagccatagccaccgcgcccggcctattgctttattttgtcttggtgagtagtcaaggaaataatcttaaattcacaatctacttatagtttgaatatatataattttgtgagaagaacacttgttatttgaaggtaatttttaaaaaattttgtaactttttaggtattcttaaattttaaattgtggttaaaaacatgcaatagtcatttcagacattattaggtgtacagtttagaagtattaagtgcagtcctgttgttttccaggaggttagagatgatttttgtcttacaaaagtaaaagcaaatactcactaaacaacaaattgtcctttccacctctctctagctcctgaagaaccccattttactttcttttttcatgactttgactaagtattctatgtaagtgtgattatacagtgtctctttttttgactattttattttacttgacatagtatcgtaaagatttatcattattgtagtatttgtcaagatgtccctattttatttatttatttatttggagtcgaactcttgctgtatctcccaggctggagtgcagtggcgccatcttggctaactgcaacctctgcttcctgggttcaagcaattctcctgcctcagcctcctgagtagctgggattacaggcacgcgccaccatgcccagctaatttttgtatttttagtagagacagagtttcaccatgttggtcaggctgagatgaccctatttcaaaagactgaataatatcctgttgtatatatgtgccgcattcgtttaatctactcatttgtaaagggacatttgcttccaggtattatcttttgtgagtcatactgcaatgtacatgaatgtacaaatatctgttccatgttttgccttgactatgggatattttgaatccactgatttagtgtcatgtatatactcttatttttttttttttattttgagacagagtctcactctgccacccaggctggagtgcagtggcgtgatctcggctcactgcaacctttgcctcccgacttcaagtgattctctacctcagccttctgagtagctgggattataggtgcgcaccaccatgcctggctaagttttttatttttagtagagacggggtttcagcatgttgcccaggctggtctcaaattcctggcctcaagtgatccacctgcctcggcctcccaaagtgctgggattacagacgtgaaccactgtgcctggctatgctcttacttttattgcctgatctcttgatgttgtgttccccaaatcattgccaaacccattgtcatgaagcttcccccttctgtattgttctaggagttttacagttatagattttatgttaaagccttagttcatttctttttttctgttttgtttcttttttcttttcttttttttttttttttgagatggagtcttgctctgtcgcccaggctagagtgcagtggcacaatctcggtttactgcaatctctgcctcccaggttctagcgattctcctgcctctgcctcccaagtagctgggattacaggtgcacgccaccactcctggctaagttttgaatttttcgtagatacagtgtttcgccatgttggccagactgctctcgaactcccgacctcaggtgatccagccgcctctgcctcccaaagtgctgggattacaggcgtgagccaccatactagacctctttttttctttttttttttgagggtctcactttgttgcagaggctggagggcagtagtgtgatctcggcttgctgcaaactctgcctcctgggttcaagtgattctcgtgcctgaacctcctgagcagcttggattacaggcatttgccaccactcccagctaatttttgttttttgtttttctttttttgagatgtagtctctctcagtcgcccaggctggagtgcaatggtgctatcttagcttactgcaacctccgcctcccgggttcaagcgattctcctgcctcagccttctgagtagctgggattacaggcgtgagccaccacgcccacctgatctttgtagttttagtagagatggggtttcaccatgttggccaggctggtctcaaattcctgaccccaggtgatccacccgcctcggcttctcaaagtgctgggactacaggtgtgagccactgcacctggctaatttttgtattttcagtggagatgggattttgccatgttggccagactggacttgaatttctgggttcaagtgattcacccacctcggcctcccaaagtgctgggatttcagtcttgagccaacacacccagccttatcttttatttatttgtttatagacagactcttgttctgtcacccagactggagtgcagtggagcaatgatagctcactgtaaccccaaactcgcagactatctttccacctcagcttccctagtagctggggctacaaaaatatgccaccatgccatgtctatttattttttgtagagatgaggtctcatgttgttcaggctggtcttgaacttctgacttcaagtaattctcttgtctcagtctttcacactgtaggaattacagtcatgtgccaccacacctggactttgctaactattttgtaatatgcaacacttttttattcatcattgtcatcctactgtgtaatagaaaaccagaacttactcttcttctttaattgtaacttaatatttgttaagtaacctcttcccatcctcccactttagtctctggtgacacctgttgtattctttgcttctataaaccctttttttcagagtcctcgtatgagtaaaattatgagatcatgaagtatttgtctttctgtgtatgacatttcacttaacatgatatcctcttggtccacccatgttgttgcaaatagcagaattttttttttttttgagatggagtcttgctctgttgcccaggctggagtgcaatggtacgatcttggctcactgcaacctctgcctcccaggttcaagcaattctcctgcctcagcctcccgagtagctaggattacaggcgcccgcctccatgcccagctaattttttgtatttcagtagagacagggtttcaccatgttgcccaggctggttgcaaacttctgagctcaggcagtccacccgcctcagcctcccaaagtgttgggattacaggcgtgagccacagcgcctggcataattttttttaatagctaagtagtattgtattgtgtatgtataccacattttcttttttcattttttttttgagacaaaatctcgctcttgttacccaggctggagtgcaatggcgtgatctcggctcaccgcaatctctgcctcttgggttcaggtgattctcctgcatcagcttcccaagtagccgggattacaggcatgtgccaccatgcccaactaattttgtgtttttaggggacggggtttctgcacgttggtcaggctggtctcgaactcctgacgtcaggtcatctgcccacctcaggcttcgaaagtgctgggattacaggtgtgagccaccggacccggccttttttctttattcatttatctgttgctatacatttgaattgattctgtatcttagcttttataaatagtgctgcaataaacacgggaatgcagatatctttttgaaatatggattttcttttttttagatatataggcagtagtggctgagcccggtggctcacatctgtaattccagcactttgggaggctgaggccggctgatcacgaggtcaggagttcgagaccagcccagccaatacggtgacaacctgcctctactgaaaatacaaaaattagccaggcatggtggcacatgcctgtagtcccagctactcgggaggctgaggcaggagaaccgcttgaaccggggagggggaggttgcagtgagccgagattgtgccacttcactccagcctgagggacacagcgagactccatctcaaagaaagaaagaagatacatacccagtagtaacattactgggtcatatagtagctctatttttaattattcgaggaacctccatactattttctataatggacataaatatttacactcccgccaacagtgtgtatgtgtttcctctttattacatcctcattagtgcttgtttttttttttttaagtatagccattctaatagcgttaggttgtatattattgtagtttgggtttgcatttacctggtgattagtttatgttgagcatctttttatgtacctgttagccattcatatgtttttttgataatacctgttaagatctacatatttttaatagattgtgttttattttagaatttcacagtttttaaaataattttgaatattaattccttgtcatatgtatagtttgtacattattttccttcattttttagattgcctcttcaccctcatagttgtttccttttatatgcaaaagcattttagcttgatgtaatctcattagctcatttttgcttttgtttcctatgcttttgaagtcttattttaaaaaattatttcccagtctaatgttttaaaacattttttctatgtttctgtttaatagtttcatagtttgtggtattacatttgagtctttaattcatcttgagttgatttttgtatataatgaggggtagggatctggttatattattctgtgtatggatatttgattttccctgccatttgttgaagagattgtcttttccccaaagtgtgttctcaataccattgttaaaaactagttggctttaggtgcatagatttgtttctgagcttattgggcacattgatctatgtgtttgtttttatgtgagtacaatgctgttttggttataatagccatgtagcaaattttgaagtcagatattgtgatgccttcagctttgcgcttttaaaaaaaatgtataaaaagtatttcctagacaagtggcagattacattttagaaacaaaaccatctttgaaaatactggccgattcttctttaaaacgtacaaataggtcttttaaaaaaacttaagttcaggggtacaagtgtacgtttgttgcactggtaaacatgtgtcatatgggtttgttgtaaagattaagcctaagtacccattagttatttttcctgatccttttcctcctccaaccttccaccctctgaaaggccccagtgtgtgctgttcccctctgtgtgtccatgtgttctcattatttacctcccacttataaatgagaacatgcagtatttggttttctattcctgtgttagtttgctagggataatggcctccagctctgtccacatgcctgcaaaggacatgatctcattcttttttatggctgcatagtatttcatggtgtatatgtaccacatttttctttatccagtctatcattaatggacatttcagttgatttcatgtctttgctatggtgaatagtgctgcagtgaacatacacgtgaatgtgtgtttataatagaagaatttatattcttttagctatatacccagtaatgaaattactggtcaaatgttatttctgtctttaggtctttaaaaaatcaccacactgtcttcaaccttagctgaacaaatttacactcccaccaacagagtataagcatttcttttcctccacaacctcgtcagcatctgttattattttgcttttttaaaatagccattctgactaaggtgagatggtatctcattgtggttttgatttgcatttctctaatcggtgatgttgagctttctttcagatgattttgatcacacataagtcttctttttaaaggctcatgtccttttaaaggttcgtgtcctttacccacctttgtttgttttttttctttttaaaggatcatgtcctttacccatctttttttgctttttttctttttttttaagtagagacagggtttcaccatgttggtcaggctgttctcgaactcctgacctcaaatgatccgccctcctcagcctcccaaagtgctgggattacaggcatgagccaccatgcccgtctttttttttttttttttttttttttttttttaaatatagacagagtcttgctctgtcaccgaggctggagtgcggtggcatgatcttggctgcaacttccacctcccagattgaagcgattctcctgcctctgcctctctagtagatgggattacaggctcccaccaccaagtttggctaattatttttttgtatttttagtagagatagggtttcaccatgttgaccaggctagtctcgaactgctgacctcaggtggtccacccgcctttgtctccaaaagtgatgattactgatgtgagccaccgcacccagacctatttcacccaatttttttttctttttttttttttttttttttttttttgagatggagtctcgctctgtcacccaggctggagtgcggtggcacgatctcggctcactgcagcctccgcctcccaggttcaagcaattctctgcttcagcctcctgagtagttgggattacaggcgcctgccaccatgtccagctaatttttgtatttttaatagagacggggtttcaccgtcgtggccaggctggtctggaattcctgacctcatgatccacccgccttggcctcccaaagtgctgtgattacaggcgtgagccgccttgcccggccccacccaatttttaatggagttgtttatgtcttgtaaatttgtttcttctagctgctggatattagacctttgacggatgcatagtttgcaaaaattttctcccataccgtaggttctgtttactctgttcatagtttcttttgctttgcagaagctctttagtttaattagattttacttatttatttatttattgtgattgctttggcatctttgtaatgaagtctttgcctgtgcctatgtcctgaatcatgttacctaggttgtctttcagggtttttatagttttgggtttttcatttaagtttgtaatccatcttgagttagtttttgtatagggtgtaaggaaaggatcaagttttaattttctgcaaatggctagccagtttatttattgaagagaaaattctttgctcattgcttttgtcagctttgtcaaaggtcagatggttgtaggtgtgcagcttaatttctggccctctattctgttccattggtctgtttctgttcttgtaccagtaccatgctgttttagtttctggagccctgtagtatagttgaaagtcgggtagtgtgatgcctccagctttgctattatttgtgtttaggattgtcatgcctattcagggtgttttttggaaagtttcatatgaattttaaaataatttttttctaattctgtgagaatgtcaatgcttgtttaatgggaaaagcatcgaatctataaattgctttgggcagtatggccattttagtgatatggattcttattattcataagcatggaaagtttttccatttgtgtcatttctgatacctttgagcagtggtttgtagttctccttgtagagatctttcacctcccttgttagctgtattcctaggcattttatcttttttgtggcaactgtgaatgtgagtttgttcgtgatttggctctcagcttgactgtcattaatgtaaaaaaatgctagtaatttttggctgggtgcagtggctcatgcctataatcccagcactttgggaggcccaggcagttggatcacctgagatcaggtgttcgagaccagcctggccaacatggtgaaatcttgtctctactaaaattacaaaaattagccaggcatggtggcgggtgcctgtaatcccaggtactcagaaggctgaagcaggagaattgcttgaacccgggaggcagaggttgcagtgagtcgagatcgcaccactgcactccagcctgggagacagagcaagattccgtctcaaagaaaaaaaagaaaaaaagaaatgctagtaatttttgcacattgattttgtattctgagagtttgccaaagttgtttatcagcttaaggagcttatgggctgagattatggcatattctcgatataagattatgttatctgcaaacaggaatagtttgatttcctctttttctatttgaatgccctttatttttcttgtcttttcttgctttttttttttttttgagacggagtttgctcttgttgctcaggctggagtgcaatggcatgatcttggctcactgcagcctccacctctgaggctcaagcaattctcctgcctcagcctcccaagtagctgggattacaggcatgcgccaccacgcctggctaattttgtatttttagtagagacaggtttcttcatcttggtcaggctggtttcgaactcccaacctgaggtgatccaccacctcggcctcccaaagtgctgggattacaggtgtgagccaccacactcagcctagatgccctttatttctttctcttttcttgttacccggaccagaagttccaatattatgttgaataggagtgatgaaagagggcatccttgtctagttttagtttttgtttgtttggttttttgagagggagtctcaccctatcacccaggctggagtgcagtggtgcgatcttggctcactggaacctccgcctcccgggttcaagcaattctccctgcctcagcctcccgagcagctgggattacaggtgcccaccaccacgcctggctaatttttgtatttttagtagagatgtggtttcaccatgttggccaggctggtcttgaacacctgacctcaggtgatctgcccgccttggcctcccaaagtggtgggattacaggtgtgagccacgcacccagcctagttttagttttcaacgagaatgtttccagtttttgcccattcagtataatgttggctgtgggtttgtcatagatgtcttttagtattttgagatatattttttcaataccttgtttattgagaggggtttttttgtttgtttgttttttgtttttctccagatggtgtctcactctgtctctccagcacctaggctggagtgcaatggcatgatctcagtgcagcctccacctactgggctcaagagattctcccacctcagcctcccgagtagctgggactacaggcgtgtgctaccacgcctggctaattttttgtatttttagtagagatgggttttcaccatgttggccaggctggtcttgaactcctgacctcaagtgatctgcctacctcagcttcccaaagtgctgggattacaggtgtgagccaccatgcccagcgtattgagagtttttaacatgaatggatgttgaagtgtattgaaagttttttatgcatctattgaaatgatcatgtggttttgttcctttttgtttgttggttggttggtgggttggttggtttttgagatggagtttctctcttgttgcccaggctggagtgcagtggtgcgatctcggctcaccacaacctccacctcccgggttcaagtgattcttcttcctcagcctctcgagtagctgggattacaggcatgtgccaccttgcctggctaattttgtatttttagtagagagggggtttctccatgttggtcaggctggtctcgaactctcgacctcaggcgatccacctggctcgacctcccaagtgttgggcttacaggcgtgagccaccgcgcctggctgattatgtggtttttgtctttagttctgttatatgatgcatcgtatttcttttttcctatttatttttttctgtctcccaggctggagtgtagtggtgtgatctcggcttctggcaacctttgtctcctaggttcaagcaattctcctgcctcagtcccaagtagctgggactacaggtgggcgcctccatgccctgctaatttttgtatttttagtagagacagtgatattgtttgattgagtctccattcagatctcaatttgaattgtgtttcccagaattcccatgtgttatgggagggaccggggggagattattgaatcgtggggtctgtttttttcctgtagtattctcgtgatattgaataagtctcacaagatatgatgggtttattagtggtttctgctttgcttctttctcattttctcttgctgctgtgatgtaagaagtgccttttggctactgccatgtttctgatgcctccccagccatgtggaattgtaagtccaattaaaccgctttttcttccccgtcctggttatgtctttatcagcagtgtgaaaacagactaatacagtaaattggtaccagtagactggggccttgctgaaaaaaaataaccgaaaatgtggaagcgattttggaactgagtaacaggcaaaggttggaacagtttggagggctcagaagaagacaggaaaatgtgggaaagtttggaacctcctaaaaatgtattgaatggctttgaaaaaaatgctgatagtgatatgaacaataagattccagctgagagggctgggcacagtggctcatgcctgtaatcccagcactttgagaggctgaggagggcagaccacgaggtcaagagatcaagactatcctggccaacatggtgaaaccctgtctctactaaaaatacaaaaatcagctgggtgtggtggcgcatgcctgtagtcccagccacttgggaggccgaggcaggagaattgtttgaacccgagaggcggaggttgctgtgagccaagattgtaccactgtactctagcctggcaacaaaatgagactccatctcaaagaaaaaaaaaaaaatcccagctgaggtggtctcagatggagatgagaaacttggaaccgaagcaaaggtgagccttatgttttagcaaagtgactggtggcattttgccctgccctagagatttgtggaactttgagcttgagagagatgatttaaggtatctggtggaagaaatttctaagcagaaaagcattcaagaggtgacttgggtacttttaaaagcactctgttttaaaagggaaacagaacataaaagttcagaaaatttgcagcctgatgatgcaatagaaaagaaaaccccattttttgaggagaaattcaagctggctacagaaatttgcataagtagcaaggagcctaatgttaatccccaagaccatggggaaaacatctctaggccatgtcagagattttcacagcagctcctcccatcacaggcccagaggcccaggaagaaaaagtggttttgctaggcatggtggctcatgcctgtaatcccagcactttgggaggctgaggtgggtggatcacctgaagtcaggagtttgagaccagcctggccaatatggtgaaaccccatctctactaaaaatacaaaaactagccaggcatggtggcaggtgcctgtaatttcagctactcaggaggctgaggcaggagaattacttgaacccaggaggcggtggaggttgcagtgagccaagatcatgccattgcactccatcctgggtgacaagagcaagacttcgtctcaaaaaaaaaaaaaagaaaaagaaaaagtggttttgtggcccggggcccagggtccccatgctgtgtgcagcctaaggacttggtgtcctgtgtcccagctactctagccatggctgaaaggggccaatgtacagctttggctgtggcttcagagggtggaagcctcaagccttggtagcttccatgtggtgttgaggctgtgggtgcacagaagtcaagaattgaggtttaggaacctccacctagatttcagaaaatgtatggcaacacgtggatatccgggcagaagtttgctgcaggggtggagccctcatggagaacctctgctagggcagtgtggaagggaaatgtggggtcagagcccccacacagtccctactggggtacagcctagtggagctgtgagaagaaggccaccatccgccagaccccagaatggtagattcacccacagcttgcactgtgcacctggaaaagctgcagacactcaatgccagccagtgaaagcaactgggagggaagctgttccctgcaaagccacaggggtggagctgttccggatcatgggaacccaccttttgcatcagcgtgacctggatctgagacttggagtcaaaggagatcattttggagctttaaaatttgactgcctcgctggattttggacttgcatggtccctgtaacccctttattttgtccaatttatctcatttggaatggctatatttacccaatgcctgtacccctattgtatctaggaagtaactagcttgcttttgattttacagactcataggcagaagggacttgccttgtctcagatgagactttggactgtggacttttgggttaatgctgaaatgagttaagactttggggatctgttggggaagcatgattggatttgaaatgtgaggacatgagatttggaggggccaggggcagaatgatattctttggatgtgtccccattcaaatctcaacttgagttgtgtatcccagaagtcccgtgttttgtgggagtgacccaggggaatgtaattgaatcatgagggctgttctttcccatgctattctcgtgatagtgaatatctctctcaagatctgatgggcttatcaggggtttccagttttgcttctttctcattttctcttgctgctgtgatataagaagggccttttgcctcccaccatgattctgatgcctccctagccatgtggaactgtaagtccaattaaacctttttcttctcagtctcaggtatgtctttatcaacagcatgaaaacagattaatataaatggggttggtggccaggtgctgtggctcttgcctgtaatcccagcactttgggaggccgaggcaggcgaatcacctgaggttgggagttcgagaccagcctgatgaacatggagaagccccatctctcttaaaaaaattagctgggcatggtggtgcatgcctataatcccagctacttgggaggctgaaacaggagaatcacttgaacccaggaggcagaggttgcggtgagccaagattgcaccattgcactccagcctgggcaagagcaaaactccatctcaaaaaaataaaaataaaaaacagatggggtttcaccatgttggccaggctggtctcaaactcctgacttcagatgatccgcccacctcggcctcccaaagtgctgggattgcatgtgtgagccaccacagctggcctgaataatatttcttaatttcagtatgttcaaccaaccttgcatttcagagatgaagcctacctgattctggtggataagttttttcatttgctgctgaatttggtttgccagtattttgttgaaattttttgcatcactgttcatcaaagatacttacctgaagctttctttttttgttgtactctgttgggttttggtgtgaagattgtcctggcctcatagaatgagttagggagaagtcccttctcctcaattgtttttttgtttttgtttttgtttttttgagacaaaacaaaactcttgtcacccaggctggagtggaatggtgtgatttcagctcactgtaacctccgcctcccgggttcaagtgattcttctgcctcagcctcttacaggcacacgccactaggcccagctaattttgtatttttagtagatacaggacttcgccctgttagccaggctgttctcgaactcctgatctcaggtgatccactcgccttggcctcccaaagtgctaggattacaggcatgagccactgcgcccagcctgtcgttaattttttgaaagaatttcagtagaaactgtaccagctcttctttttacatctggtggaattcaactgtgaatctttcttcccatggggactcagggaccatcctgtgtcatcttctgagggcccggaaggggtttgcctgtgggctttctaattgccggaagggacggcatgctgcatggtgggtgcccctgctgtgggttagggggtacccctgcttggcatcccgcccctctggttcctgcttccccccctcattcttgggggtgggggtggtggcagcttgatccccgggctgggacagggctgggggagcctggtgtggatggctgaggcactggtgtctggggatgtggcccagcaggctccatcccaggtaaggccctgagggcccagaggtagccgtcttggtcccagccctctcccaccccaggggtagggtggtcactaaggggcagtccctgcacttgagcccttcctcctctttccaccacctacggttgatcaacagacggggtcaggggcatggtgggaaggaaggttggcaacttagataccagaggaacagcttcaggccacgagcgcctcccttggcctgtagggtggacccgctgtgcctctgccagttggcttttccttctgtctgccaggtccaccagatgtttgccaagagtgtaggacttggccaccagcttgaagtgtttcaggtggaccagagggctctcgccggggtcagaactgcttagatccagcagagggtgcgattgtggctcactgctacctccatcttcccaggcttaccgaggcgatcctcccattttggtctcccaagtggctgcggctctggggatctttctgttttgttttgttttgtttttttccctaggcccacttcaagtttgtttccacagtacattgaattgctgttttttttttctttcttttctctctgttatgctccttcctgcatactgaagttcctgttattttagattttttcttttcttttttttttttaaatcaggctttggctcccaaagtgctggaattacaggtgtgagccaccatgcctggctctatctatctatctatctatctatctatctatctgtctatctgtctatctatctgtgggcactctatagataggtaggtaggtaggtggtaggtaggtaggtagaaaataaataagttttcatttatttatttatttattttgagatggaatttcactcttgtcacccaggctgggcaccatctccagtcactgcaaccaccgcttcctgggttcaagcaattctccatcctcagcctcccaagtatctgggattacaggcgtgtgccaccacacccagctaacttttgtatttttagtagaaatggggtttcaacatgttgaccaggctgatctcgaactcctgacctcaggtgatccacccacctcggcctcccagagtgctgggattacagtcgtgagccaaggagcccggcctatctatttttttagtagagatgtggtctcactatgttgtccaggctttggttatatatattactcttttaactttgtcatttttcattagagatgtctcacaatgttgcccccagtatcgtatcaaactccttggctccatctatcctcccgatttggcctcccaaagtgctgggattacaggcatgagccaccgtgcctcatctggttatatttttgatgtgttgactctttccagttcagatgcataatctcatccctgaacatcctgctggtgcgattatgacatatgattttacccagcaccagagggatttgatgctcctgcctgggcccaactcacagaagggattgtgacatatcactggacccagcactgaggtaatgtgactatcttactgccttgacactgcccacagaggacatagtgacatatcactgggtcttgtacccaggtggtgtgaatcttctgccttggttcttccacaggggacattgtgtaatatcgttgggcctcacacgtacgttatgtgactctcctgcgtgtgccctgtccatgtgggccattgtgacatattgctgggtccaacaactggttgatgtagctctactgcctaggtcctgcctatggaggactttgtgatgtatccctgaacccatcacacaggtaatgcaactctattctcctacctggccccttctcacagaagagattgtaacatatcactgggctaagcacctagctcacatgactctccccctctttctagattctgccctcagaggacattgtgacatgtcactgggcctaatactaagatgacatcattctttagttttggcactgccctcagaagccgtggtggtgtattgctgggcccagagccaatgtgatgtgagtctcctgcctggatcctgcctacaaggtgcattgtgacatacctctgggccctttgactattttatgtgactctcctctcttacctggatgttgcccaaaaagagattgtgacatactttgcacccagcactgaggtgatttgactgtcctcttctgcctgtgctttgcctacaggagagagagtgacttattactgagtttagcatacacatgatgtgattttcctccactcacagaagtcattgtgacatatatcttggcccatcactgagattgtgactgtctttttcctgggacctgtccacagtggagagtatgacactttttggccaagcacctacaagatacgactctcttcttacacctgggccactggggtgattttgacatgtagttggccccagctccaagattatgtgactccacacttcttcctgagccctacctacaggtagcattgtgtcatatctgtgagaccctcaattaggtgaaatgactctttgtttgggccctcttctcaaggtaccgtgacattgctgggcccagcatctaggtgatgtaactctactgtactgtttggtttctgcctaaaaagggattgtgacataccactctatcaagaacctaggtgaggtgactcctctccagcctgggacctgcatacattgcttattgacacatatcactggctccagcacctaggtaatgcaactctcctacatgggcccccacccataggggtattataagatatctttctattaatcacctaggtggtgtgacactcctcttctgcctgggccctcccaaaaaagtattgttacacatcactgagcccagcacctaggtgatgtgactcttctctcatgcatcggccctgccaactggggtgtttgttacatatagctgggcgcagcccctaggtcatgcgattcttttttttctgagccctacccacagaaggcattttgacatattttgagcccatcatttaggtgatgtgacccttttgcatgggccctccccacaaggggtactgtgacatattgctgaacccagtacataggtgatgtgactctgctctatggattgggctttggccaagcagggctgtgatgtgttgctggactcaccacctatgtattgtgattattctgttctgcctaagccctgcgtacagtgtgtattgtgacatatgcctggatttagcacctaggaaatgtgactttatggcatgggaactgtccacaaaagtgttatgacatctttttcatcacctaggtgatatgacccttttattttcccggttctggcatattctgggtatagtaacatatcattgagtccaatgcctatgggatatgtggctcctccctgggcccagcacatagagtgcctcattgacatatctctgcatccatagtctaggagatttaactcttctcctgactttcttctcctgcctagtttcttcacacaaaaagtattgtcacatatcactgggcccaacagcaacagtaacaatgatgttactctttggcctactgtttgccctcagaaggcattgtgacacattacttggccaacatcaaggtcatgtgcttctcctgcctggacgctgtcacaggggacattgtgacatatctctgtgtccatcacccaggtgaggtgaatcttttcacctgcctggtgtctgcttgctgggggataatgatatatattgctgatttcataccgagctgatgtaactcttctcgtcttcatacatcctgcccggaagaaaactgaaatattgctgggcccaacaccaaggttatttggcctggccccgccttcaaaaggcattgtgacatattgcagtgcccagcaccaatgtaatttgtctcctgcctacaccctgcctacttggggcattgtgacatgtcttggcccatcaactatttgataaagctctcctttcttacctgggtttttcccatagtagagattgtgaaagatctctgggaccagcacctagattatgtgactctcttcttttgcctgggccctttccacggggatgattgtgtcatatagttttacccagcccctaggttatggtttctgtgacatattgcttgactcagcacataggtgatatgactcttctccaccgcttggactctgtcaaggaggtattgtgggccaggtgtggtggctcatgcctgtaatttcagcactttgggaggtcaaggcaggtgggtcacctgaggtctggagtctaagaccagcctggccaacatggcaaaacgctgtctctaccaaaaatacaaagaaaaaaatagccgggtatgatagtgtgcccctgtagtcctggctacttgggaggctgagacaggagaatcacttgaacccaagaagtggaggttgtggtgagccaagatcattccattgcacttcagcctgggtgacagagtgagactctgtctcaagaaaaaaaaaaaaagaaggtattgcaatgtatcactgggactgacacctaggttatgatactctctcctgcctgagccctgcataaattgtatattttgacatagcactgcattcaacatatagctgatgcaactctagcacataggccctgctcatgggcatattaggacatatatttttcttcatcacctaggttatgtgaatcctcttcttcccagatcctgccaaaaggaaagattgtgacatatcactggaaccagcacttaggtaatgtgacttttctgctctgcctgagaaccacatttttggtattgtgacatttcactgtgccaaacacctaaacgatgggaggccctgcctcagccctgtccacaggggttcttgtgacatatatctgcatctattacataaaaaatgtgactccatttctacctgtcccctgcttacaggaaagattgtgacatagtgcagggtccagccaccaggtgatgtgtctctcctacgtgtgcattatttttaggaagaaatggtaacataccattggttgagaactcaggtgatatgactctcctgcctgatcagtgccgtcagggaaaattttacatatcatttgcccagcatccaggtgatgtgacggttctgggtactttctgtcaacaagtaggttggtaacgtatagcttagcccagctcacaggtgtgatgatgactctaatactttgtaccagccaatagaagagatactgtctctcacagctaggcttagaaaaaggggtaaaatcctgggtctcctctctgtatgaaggttatagagaattaatactctcgcatattgtataaagccctcagatggtacagagagtgtcgtcataggaaaaagcaaacagattagatcatgtttcttgtaagcacactgtcaatttttagaattaccactatcacacagggacagaacccacggaggagttcatgattctcatgtgcagatgcagtccatagttaaaattgtgatatcatatgtgaacatctggccacagttgagatggtgactcatttctaaacccaggtcataggcaggtgaggactgtcctctgtggacccagccattcggagaatgttgactctcatacctagacttagagccgcataagatcataggtccatagcaccacaaaaatctcagagcagattgtgactcatgcataccatataaagccctcaaatggtacagagagtgtcttgacagggccaagcacagaggtgagattgtgaccctcatattcacaaccagtcaacagtagagattgtcatctgcttaaataaacacaacccacttctgaggttctgaatctcacattgggaggcagttgaatgttggaaaatggactctgtttgtggattctgtccacagttgggttgatgactctttaaccaaaattcagcacacctttgtggctgtcacttcactaaggcacagggtttacaagagaaattgaggctctcatacacaaatccattccaccattgagattgtgacttcttgtacttagacccaacttgcaggagatgttgactctcattccttgactcaagaccttgtcatttttaatgtcaccaaaagaccttcttataggtgtgattgtgacatgtgcctctgcccaacgtctgagttatttgactctcacctgggcccagtacccagtgacatattaggggacccagacctttggtaatgtcactctgttctgccttgatatagcccacaggaggcattgtgacatatcactgggccttgcactcaggtgatgtgagttttctcttcttggtgctgccgcataggtgtattgtgacatattgttgggcctaagttatgtgactctcttgcttgtgttcttcccacttaggctattgtgacatatgcctgaggctaacacccagatgatataagtcttcatcctggaccctgtctacagaagtcattgcgatatatgtcttcaccaatcactgaggtcgaacgcccagtgatgtgactctccttcctggtccatgccctcagggaagattgtgacataccccggcccagcacacagttaatgtcactcttgtgcttgctgtctacccatgggtaggattgtgacatatatcgtggccaagcacaaagatgtaatgactgtcatacctcgaagaaagcaatagagttaatgttgctcctaggtaggcttaggaaaatgaggaagtcgtctttctgttcaaatctcactctctgacatatataaagccctagtgtgttacagagaatgtcataacagggctcctcacacaggtgagatcgtgttctatacacagcccaccaatcttgagaattgtcaccctcacacatggacagagtccactggtgaagtcctgaatcacacatgaatgcagttcacaattggaattgtgactgtcatcattgaacatctagccacaatttggatggtgattctttttttttttttttttttttttttttttttttttttttttttgagacagaatcttgctctgtcacccaggctggagtgcagtgatgcaatcttggctcactgcaacctctgcctcctgggttcaagcgattctcctgcctcatccccctgagtagctgtgattccaggcacccgccaccaagcccagctaatttttgtattttaagtagagacagggtttcaccatgttggccaggctggtctcgaagtcctgacctcgtgatctgcccacctcagcctcccaaagtgctgggattacaggtgtgaaccaccatgcccggcagtgattcatttctaaacccagcttgttaaaaggtgaggactctcctatctggactaaaccaatagtttagtttagttaggatagatgttgatgctcatatctgggcttggaaccacaggaaagatcttcttggacaaaggtcacagaggattaccactcttgcatattgtataaatcatcaagtgaaactatcataagagaacatagcacatgcgtgagattttgtcttttgaatgtacacccaggcaacagtaaagattgtcattctcccatattgaggttctgaatgtcagacacagagactgtgaaaagttgaataattgactctcacgtggatctggactagaggtggactggtgactctcagagcaagattcagcacacataagagtctgtgacttcactgaaaggacaagcctgcagaagaaattgtggctttcctgcccacattctgtcaaccattgatattgtgactcacatacttagacccaacgtacagaaagtgttgactcatacctagcacctggacatatatggaatttctactctaattcctggacttttctgcaggtgtgattgtatgcatctgctacccaccttagtgatttgactttgctgccttggcccagcccacagatgagattgtgacatatcgcttgactctgcaccttgatggtgcaatctccgctcactgcaacctctgcctcccaggttcaagtgattcttctgcctcagcctcctgaggagctgggagtacaggcatgcaccaccacacccaactagtttttgtatttttagtagagacggggtttcaccatgttggtcaggctggtctcgaactcctgacctcgtgttctgcccgcctcagcctcccaaagtcctgggattacaggtatgagccaccatgcccggcctcgctgggcctttcacccagatgatgtgagttatttttcttgcattggtactgctcacagggtgcattgtgacatatttctaagcccttcactcaggttatgtgactacttttttgcctgtgccctaactattttgcatgttaggacatattatgaggcccaacacctgtaaaatagaggctcctccctgggccttgtctacagagggccttgtgacatatctctgcatcagtcacctaggaaatgtgactccgtttttgcctgcactctgtccacaggaaacattgtgacttatcactaggcccaggtactagttgatgtgtctctggtaactgggccttgaccacagagaggattgttacctattgctgggctcagcccccatgtggtgtgactgtactgtctgtgtcctgctttcaggagaaggctgtaacatattcctggttgagtattcaggtgatgtgacactcctgtttggtccctgccttcagaaaagattgtgatgtactcctggccaaaaacccaggtgatgtgactcttatctctccctattcacaggtaagattgtaaaatgccttggtctagctcacaggtgtgatgatgttgatcctttttttttttttattttatttattttttttatttttggagatggagttgctctgtcgcccaggctggagtgcagtggtgtgatctcagctcactgcaacctccacctcctgggttctagggattctcctgcctcagcctcccaagtagctgggattacaggtgcacaccaccaatcccggctaatttttgtattttccgtagagacatggtttcagcatgttggccaggctggtctcgagctccgtacttcaagtgatctgcctgcctcagcctcgcaaagttctgggattacaggcatgagccaccgtgcccggccacaagtgtggtggtgactctcatacctcaaaccagccaataggagagatcctgtttcttatagctaggcttaaaatcatgagtatggtcatgggtcttcttgtacgaaggtcctagagaaataccactttcttttatactatataaatctcttactgtacagagattgccattccagcgttcagaacacaggtgagattgtgtttctcatatgcataccccagcaaacattaaaattgtcatcttcacacatggacagggtccactggtaagtcctgaatctcacacatggaaaaaatccacagttgaaattgtgactgtcatatatgaacatccggccagagttgaaatcatgagtcatttctaaattcagtttataggcaagtgagaatttttctatctgaacctgagagaataaaaggtggttttgaattagacaaaatagagctaaaagttcaaacaaatggtggaaggattgtaaaaatcttgcaaagaattccatgtgtggttatattgactaaattcaaaaaggtactacatggtttttctgtaaataaaaaattgaaataaaagcacaacaaggtactcgtaatgcactaatctgctttttagcaaactttgttaacggttataacagattgttgcttctttaaaattttggagtcattgtaacaaaataaataatttaggataatctgaaattctattttataacatcaagtgtttcaaatctctaacacttaacatgcttcccaaaatcatactttagtttcaaaattgcctttcctgattcctggcttttggatacttcagagggtccctggagtatctaaaagagaggtaaacagaattatttgacatgtttaggtacatgagattggcaaaatggtgtttattccatctttaggttatattttggtgaataatactaatatatgttccaaaattgtttgggatttctaaaattctaatatatggtatcaatggtaattaaggttgttatgttaagttattgtaaaccacagagatagccaaacttctttgtcaattgtgtttctaactgtaactaacctggacattttgttattcacagacaagtgttgtcttgtcttaattatttttaaaagatggtttatattaaactatagaactttcacaggtgctttcaaatacaggtttctgatagccttggagattgtgacattggaataaaggaaaaaaggacaggattcagggccgggtgtggtggcttacacctgtaatcccagcactttgggaggccaaggcaggtggatcacgagttcagatcgagaccatcctggctaacacggtgaaacccagactctactaaaaatacaaaaaattagcatggtggctggcacctctagtctcagctactcgggaggctgaggcaggagaatcgcttgaacctgggaggcggaggttgcagtgagctgagatcacaccactgcactttagcctgggcgacagagagagactccatctcaaaaaaaaaaaaaaaaaaaatgcacaggactcatgaggagctaaaatgttcacaaatatcaagcaaaacaagagttaagtaaatggactgcactcagaaaactaaagcaacctttttgacttttgcttggtatattgctgatccttgtttaattttttagagtcaaggaaacttgtttttaactactatttatggccttcaataattgagtaaagtatactcctatgaacaaaattaggaatatgtttgtttttctctgcctctttcctctagaatttggaaactatctgtgagtattctcaacttatggcaatatagttgtttgtatgagtgcaataagaatccattttctttagcaacaggatgcaactggagaaactgtttgtttgtttgttttaaccaaggctttgactgaaagggtatgcttccctttaaagagtcaagcttgacttgcagagatgataaaagccccttgaaaaaactgccctcatatccttgtctacacagtctctgtacagcgttcctgacctgtggtcagtgaaaaatatcactttttaacaggcctaggagctccaagtttgtcttgggaccttaaaaggaaaggattacccagctcacaggtatttgaggatacaaacacatggctgtgctcagctttagaaggtcttattccttgtggaagatttccatcgaagccaatctaaaaggcctatgtagagatagtcatttttgctcaccttatgcaaataatcagggcgagtataggactaaaggctatgttgcaaacaactcagtcctgttatgattttttcttttcttttttttttttttttttagatggagtctcgctctgtcacccaggctggagtgcagtggcacaatctcggctcactgcatcctccacctcccaggttcaagcaattctctgcctcagcctcttgggtagctgggattacaggtgcccgccaccatgccctgctaatttttgtatttttagtacagacaggatttagccatcttggccagctgctcctaaactcctgacctcatgatccacccacttcggcctccaaagtgctgggattacaggcgtgagctaccatgcctggccagaacccaatattttctacaatattttatacatttctttctacatggattatataaattgggctttccagcagaaaaaggaaaagaaaaagcatatgtctcaatgagagcacacaattatgagaatggcaaccatgtaaagaaaaattgcaaggacttagtgctgatgaggatttacagcaactaaaactagaaatgtaaaatgatacagtaaaacaatttaacggtttattgtaatgttatatatacatttatcatattaccaggatatccactcctaggtcattactaaagcaaagtgaaaactaatgttgaaatgcaaacctttttgtggctgtgtattgctaactttattttcaattgcaaaaagctaggtataaaccagttgctttatagcagttgaataaactgtggtgcatccataaaatagcatcctagttgtcaacaacaacaaaaaacaaattattgatctacgccacagtatgcatgagtcagacatgcatttccttcagtgaaggaagtaagatccaaaaggctacatattacatgatccaattatatggcattgtagaaaaagaaagttatagagattgattataatcaagctaggcttgatagctcaaacctataatctcagcatgttgggaggctgaggtgagagagttgtttgagtcagggattttaagagcagcctgagcaatataacaagaccttcctaaaaaaaagaagaagaaagcagaaggagaaggagaaggggagatggagaaatagaaggaggaggagaaaaggaaggggaagaaaaaagaggaggaggaaggaaaagcaggaggaagaggagaaagaataacaaaaagtagtagtagttaggacgatgaaacagttctgtgtggtactctgaagatgggtatgtgactctagacagttgtcaaatcttatgaaactgaacatcacagagaataaattttcctctgcaaaacaacacaaaacaaaaaaaatacattgatttggagtatatttagatacaatgtagaaaattttaaaaggagcttaacctaatagaaatgtattacctaaccctattaaagagggttggaatgaggccaggcatggttgctcatgcctgtaatcccagcattttgggaggccgaggcaggtggatcacctgaggtcgagaatttgagactagcctgaccaacatggagaaaccccatctctacaaaaaacacaaaattagctgggtatggtggcacatgcctgtaatcccagctcctcgggaggttgaggcaggagaatcacttgaacccagaggtgtatgttatgaagagccaagatcgtgccattgcactccagcctgggccacgagagcgagaactgcgtctcaaaaaaaaaaaaaaaaaaggttggaatgaaaggtcttaatttaaatcactttgaaaaacagtgttttgattgaatactgcaagagtcaaaaactatacacaaactgtattcttgttgttttttcataagcatatgaattagcaatttttaaaactatatgttggcatatacacacacgcatagtaattactgcctgttttttgaacttgaaaaatgttagcatcaaagggagaattttagaataaatgatgtgatgctggaccggagttgcgcatgtttttgtttttttttttttgagacagtcattgtcacccaggctgtagtgcagtggtgcattcctggctcactgaagcctccacctcccaggttcaagtgattttcatgtttgagcctcctgagtagctagaattacaggtgtgtaccaactcacctgactaatttttgtatttttagtaatgatggggtttcaccatgttggccaggctggtctcaaacccccttgatctgcccaccttgaccttccaaagtgctgggattacaggtgtgagccaccacacctggcctgttttttcaataagacttatgacacccacctcagacttccaagtatcctggaccctctggtgatatcctgtctctactttaaaaaaaaaataccaaaaaaaaaaaaaaaaaaaaaaaaaaccaccacagctctgttttttgttatttttttaaagtagagacagggtctcaccatgttgcccaagctcgtcttgaactcttgagctcaagcagtttgtcccttttggccttccaaagtgctgggattacaggcagtgtattacttggtaagaattcattaagctttgcatgaattaatgatttccacgtatatttctgtatgaatgttttatatcaacaaaaaattacatagtacatatttgcacaaaatgctaactcatctcagaataatggcagcatcttttggtttgtttatggtggaacacactcaggacaagatcatacagattgtaatattccaagaggagtattaaagccccaccccttgggtgaaactgtaggtctttttatttttacctcagtttggttcatggtatgttttttattttaagagaatgcaatttttttgttgttgttgtttgttttttccagaaaatgtcccctcacagcaatgattgccaacgccgaggcacctagcacagtgtcttgctcagtgggtactcagtatatatggaactgggttgattaaggcacaaaaccaacagcaaggttggttcagtgaagaataatttagtaatactggttagactaaaaggccatgacttagcagcaaacatttttacattcatttgagaaataatttacaattaggtcacctaaaaatgttaatttacagcggtggcatttaagcttggctgctctgtcatcacctatacagattaaaatcacactgttgcccaggttcaactcaagcaattctgatttaattagggtgttgcaatttgtgtttaggggatttttaacaccaccaccccctcccacccccacgctgccccaagtgatttttacatgcagtctgggatgaaaacaattggtttaggatgagggatggattcactgtgtgtgattatcatgagtgctgctgagatttgtcccatggctgcttctgactttgggattttgaaaagcagcgctgccattgtaaaaatcaaaagacagcttcaagatgtactcaaatactttgctaaactgcaacagaataaaatgtcttcttagcagctcggtctatagtcactttaattcaaggtaagagattgtttcaggtacagtagttttagtaagtgttgaaaatcataaatagcctacacataccaagaaactattttaatcctttgacatatttgacaggcttttccaaatcaaattttagcttacaaattgtcttttttttttgtttgtttgtttttgtttttgagacagagtctcactctattgccctggctggagcacggtggtgcgatcttggctcactgcaacctctgcctcccaggttcaagcaattctcctgtctcagccttccaagtagcagggattacaggtgtgtgccaccatgcacggctaatttttgtatttttagtagagacggggttttgctatgttggccaggctggtctcgaactcctaacttcaggtgatctacctgcctcggcctctcattaagtgatgggattacaggcatgagccacagcacccagccaaaaaattgtgtcttttttgacctctaacttttggatgctatagagtgccaatgcagcatataaaagaataagaaacagaattttttttttgttgaattacatggaaagcattgtcaaaaatgtttgatcttcaacttaatattttaataaatgttattaatgtttatttcaaaatgtatgaaatttccttttttttgagacggagtcttgctctgtcaccaggctggagtgcagtggtgcaatcttggctcactgcaaccccgcctcccaggttcaagtgattctcctgcctcagtctctcaagtagctgggactacaggcacacaccaccacgcccagctaattttttttttccttttttttcttttttttttgaggcggagtctccatctgtcacccaggctggagtgcagttgtgagatgtcgactcactgcagcctctgcctccagggttcaagtgattctcctgcctcagcctcccgagtagctgggattacaggcgccacacccagctaatttttgtatttttagtagagatggggtttcaccaggttggtcaggctggttttgaactcctgacctgacctggttttgaattcctgagcccgcctcaggctccccaagtgctgggattacaggtgtgagccactgcgcctagcctaatttttgtatttttagtaaagacaaggtttcaccatgttggccagtatggtcttgatattttgaccttgtgatccacccgccttggcctcccaaagtgctgagattacaggcgtgagccaccgtgcccagccaatgtatgaaatttctaaaaatctaatttatctgagtatatctaattgtcataattatggttattatgacaaattattgtaggctgaagacataatcgatttcttttatttgtttctttataaccatttttttttttaagacggagtttcacttttgttgcccaggctagggtgcagtggtgtgatcttggctcacagcaacctgcacctcccaggttcaagcgattctcctgcctcagcctcccaagtagctgagattacaggcatgcaccaccatgcctggctaatttttgtatttttagtagagaaggggtttcaccatgttgatcaggctggatggtctcgaacttctgaccttgggtgatccacccgccttggcctcccaaagtgctgggattacaggcatgagccaccgtgtctggcctctttataaccatttttttttttaagacggagtttcacttttgttgcccaggctagggtgcagtggtgtgatcttggctcacagcaacctccacctcccaggttcaagcgattctcctgcctcagcctcccaagtagctgagattacaggcatgcaccaccatgcctggctaatttttgtatttttagtagagaaggggtttcaccatgttgatcaggctggatggtctcgaacttctgaccttgggtgatccacccgccttggcctcccaaagtgctgggattacaggcatgagccaccgtgtctggcctctttataaccattttaagtcatttccacagttaatggtctaattctaatgcagtttctcaaaactccaaaagcttgcaaaattgtaaaatatagtgtctttaaggaggtttatgaaagtatgggtaaagtcgagtataggtttctgatcagtttgggattaattgtttggactgggtaaggactctgagaatcctaatgaagagattgattcttataaaactgctaacccaagcaaaacaaagattaattaaatattagaaaaatattctgccacatattgtgttaaatcagccagtactgaagttttttagacatgccatttgaatgaactctgtggcctaagtcaaattacctatgataacccctcagttttcagtgctgtgcacctaaattgtagaaacctggtatttaagaggacaaatttaatgttaagtgtggactcttggagaacctagacagccaacagctacttgttcattcctgagttcttaaagcttccattattaacagctctgcattccattactcatcacagaagagataaaataatctaaattaaatataaattaagtttgtggtgactcttctaaattactaaaataggttaagaccaattttttttgtcaagcatataatcccaataagacaatcaaaacttcttgtacatttctgctacctgatgagccatttaaacatttatacagaaattttatttaattgtcattttaatgcatgttttcttgtataaaagttttctcatgcaagagggttgatgttataacagtaactaaaaggatattaggatacatgttttctcatatcttcagtgataaagatacttatttctctagacaagttgtaaaactgttaaacaagatattaggctgggcatggtggcttatgcctgtaatcccagcagttttggaggctgaggtgggtggaacacttgaggtcaggagttcaagaccagcctgatcaacatagtgaaaccccgtctctactaaaaattacaaaaaattagccgggcatggtggtgcatgcctgtagtcccagctactcgggaggctgaggcaggagaattgcttgaacccaggaggcggaggtttcagtgagccgacatcacaccactgcactccagtctggagatagaacaagactccgtctcaaaaaaaaaaaaagatagatacagtagtattgagcaaaactaactaaattgactggattgcttttgtaattgcagattgatgacatatcagatccatttagagtggaaaaaatatgttggccatttaaaaatagtcattggaaggcctatgcacctaagagaacctcatgtatcttctgctactgaagtctaatattactaaattcaaaaaggctttaatgcattatgacaaagcatatgaagaaagccttaaggtgaagaaagccttaatagtctactgactgtggacagtaaaaccctttattatctagaacccagagattgagtctgcctgccatgtacactgaagcaagacatcaagactttgaaagctgggttgataatctcacaacttagaagggcccctccagactctttaattgtaaacccataggagatcttaaagctaaccagaaagatttctcctaaaaagcagatggatatctttatgtagatagcttttttaataagatcaaaaatcaagacacatttgctatcatgatactcttagttaagtttgtttatggctctacaaacaatagaaatttaaaaagcatcttttgtgtgcactcattgggtatacttatatgtagagaattttgcagccaacgtgtgaaaaaacataacatcttttataggtaaaaaatgaaaggcaggccaggcacggtggctaatgcctgtaatcccaacactttgggaggctgaggtgggcagatcatgaggtcaggagtttgagaccagcctgaccaacatagtgaaaccccatctctactaaaaatacaaaaattagtcagcgtggtggtgcactcctgtaatcccagctactcgtgggagactggggcacgagaatcgcttaaacccgggaggtggaagttgcagtgagctgaaatcgcgccactaccctccaggctgggctacagagcgagacttcgtctcaaaaaaatagaagaaaaaaaaaaaaaaactggaaggccaatatgggtgagaaattttaatgggacatttgttgtctcatcagaaacagaatgtgtgtccactgctcttaacctatttcacaagttaaagagaacttattcaaaataggttaaagagcattgccagggtgccattacttttctaaatgggcatcctttgataggtcttttttccccctggtttagagtaaatgaggcaatggttagaaatgtatcccctatcatagggctttatagcagattgcactgtaaaggctatggttacacaatagactttaaattttttgctaaagttgtgctgaatcatataatttctttggattacttactgtataaacagaagtgtctgcagttgctaattcttgtagttgcacatggagaaatacattgggtattacagagatgcagttgtaggggattaatgaacaggctgtttggttaaaataagtagactatagctaattatttgatctatgtaatgttagttggtggttcatgaggaccctggttaaaaagcacgcttcaaactcttcgtattatcctcctggtagtcaaaatagtagtctccctgctgcattgtattctcaaaagttagaaatgttttcatgcaatcacctgtagaatataaaattgtctctcactaactggaatgacagaaactcaaagacatatgtaactatgatgaaaccataacctaggaatgacataagaacaaagaccctaaataatggaaacagtggtactaaggccctgagttttggttacactgtgcactgttgaaaattttttgaacaaaattattagaggccatcattctggactgagcttgtgcactaggtccaaacagacaaaatcaaactgaaaatttaaggaaataggtagattctgtaggttttgtttttcttctgtaaacagcagatcttaacacaaggggtttccctctactcaaacctttaaaaataataataaaataataacctgaatttcttgattccactttacaaaacccatagttctgctatttcacagtggaatctgagactaagtacatttttgatggtgacagtgttatcaatgtctaaagttttggtctatcaaaatttagaagatgaccaaaaaaggagaaattgtttaattataccctaaatctaccccctttcatgtttaagtttggtcaataagtttttttgttgttttgttttgtttacatagtaaactgaaacctaactgaatgtgtaaatagactgtactcatttttgtaccaacaactgtgttttggccaataaaaggatgtcaaatgttcaaaccatgtttaaataaggaaaatcccaagctgtaatcaatctagctgttcctgtatttcacttctattttctgatgtcaccttgcttcttctgtccataaatctttcaccatcatgttgctgtgctggagtatttcagagcctactttggatccacaggctactcaatttgcaaatccctctttgcccaataaaactctgttaaatttagtttatctaaagttgtttttctttttcttttctttttttttttttttttttgagacggagtctcgctttgtcacccaggctggagtgcagtggagcgatctcggctcactgcaagctccgcctcccgggttctcgccattctcctgcctcagcctccccagtagttgggaatacaggcgcccgccatcacacccggctaatttttttatttttatttatttttatttttattttatttatttttatttatttttatttttagtagagacggagtttcaccgtgttagccaggatggtctcgatctcctgacttcatgatccgcccgcctcggcctcccaagtgctgggattacaggcgtgagccaccatgcccggccctaaagttgtttttcttttagaagttttcaaatgtattctctgatcaaaaatgaataatctgttgttgggctttgattttctaaactcatccctcagctatttttccaaattattctatgtcctttcaaaatgtttctgcaatttttttgagatggggtctcattctatcacccaggctggagtgtagtggtgtaatcaattatggcttactgcggcttttaccttccatactcaagccatcctcctgccctagtcacagagtacctcggactacaggcatgcaacatcatgcttggctaattttttttcatgaagacaggattttactatgtcgcccacgctgtgtttgaactgctgagctcaagttattctcccatctcagcctcacaaagtgctaagattacaggtgtgaaccaccatgtgcttctgcaatttcttgacaggattatttccaataataaacagtactatgtgggcacaaatctaaaaaaaaaaaaaactgtcttcttttgcagaagtgtcactctccagaatttcaagggtctgtggcagttactctagtaatatagtttgatctatggaggtgcctgagctttggagtcagaatttatcctgaggttcagcccagccaattagtagctttgggtctttggacaagtttcttcatgtgaaagagttgtataaaccacatatgcaaaaaaggcagaatgatactaattgcagaaattgcagcaatttttcatccctcctatatcctttgccacgtgcttttttacagccgttcccattgagatatggaatctgttttccagaccctagatacggctgaccttatttcctcaggtcagtagaaacctgtgaacatgaccgtgtgccagtttggggcctaggctcaaatggtcttgaatgcttctgcttttctttcagaatgctgccctctccatgaacaaagcacatgttagccagctggaggataacataacatggtgggtggggaagagaagcaaagtgcctctgttgacagaagcagaagctcacccccagaagcagaagcttacccccagaagcacagcttcctagtcaagaagcagttgttgatacatgtctgaaggagctcagctgggaccagaagaatggccccagtgagcccagcctaaatggctgaccatctcaattattacctaataagttttggatggttggttatgctgcaatagctaactaatacatgcacccagtgcagataggtgccatgatttaatgacaggttgattactagttaccttctaacagtgggctccataaaggtactaatattttcccctgatttaaagttagatgtgttgtaagataatgttgagtaacgctgcaatacatgtagatatgtatgcatgtgattggtccttagtccccgcacgcacaggagaaaacgtaaaactacatcctgacacttagggccaaggccaaatagcaaaataattttgcctttaatctgttttcttcatatctaacattggaggtccagactgtggacagatctgaagacatagagttttcttcccctgtggccccatcatcctttgttcagtgtctgatctctggaagaaaggtggtcaccagatagtgatctacctgtggttattctgctttttcttttcttttcttttcttttctttctttctttcctttctttccttatttcttttctttctctcttttctttctttctttttctctctctctttctctcctcctcccttcctcctttccttccttcctttcatctcactctgtcaccaggctggagttcagtggtacgatctcggctcattgcaacctccacctcctgggttcaagcgattcccctgccttagcctcccgagtagctgggattacaggcgcgcgccactactcccagctacttttttttttttttttttttgtatttttagtagagacggggtttcacttgttggccaggctggtctcaaactcctgacctcagatgatccacccgcctcggccccccaaagtgctgggattacaggcgtgagccaccgcgcccggtctatgttcttttgatttgtgaatattcatatagcgtattatttataaatacatatgatcttacacaaaaggttaaagtcagtaccctctggggtgggcctgtctcagttcagggaggaagtcctgcccgaaaaggctgcagcctacgctgtcactcttcattcagtccagcatctgatcacatctgtcactcagggcctgagggggcggggccttaaacgttatccaatcggggacactgggcggggggccgtccaatcaggcccgcagctggagcagacagggcggcttccgggatttggcgcggcctttgtttctcgctgccgccgaagctccaattttcgtctgtctgctttgtgtcctctgcacgtagaagcccagcctgtgtggccctgcgacctgcgggtattgggagatccacagctaagacgccagggccccctggaagcctagaaatggtgagagtgccggtccgacatcccgagagagggaacggggctggttggaaccggtgggaagcggctgtggcgggacccaggcctccccgcagtcagcttcacaatctgcgcccagagttcttgcccagctcggcctcagtccccttcagccatacgatggcggccgcgctgacagccggggccccggcgtcctgtctcttccctgcactgtgactgtgccctgccctggagccctctctgggcagctctgcacccgcagcgctgcgtctctcccagattatgcaggaaccagagaggatcgtcagaggagaatcctgactcgggctgcgggttcatgaatgggaagagctttggtctgtggcgttcccaattcctctttccttctgttaaaaatttatgggagtcatcaccaaaatattaaagaatttaattaaagaatgattctaaaattgtagagcacccagttatggggtgtagcttgttatccatgggacgggcttgaaggaaagactttcataagatgcatgatgcaaaaacccaaattcagtaatcggttaggtacagttacatagtttctaaatttgcaccttgagcgtacaaattttctggttatgtaatcagagcttaataggcagtttatagtttgttacgcctaaattttgttttccttaatgtagtaatttacaaaaaaatacatttgagttacatttttttttaaagtaggaatccaggcatcgcagccacgtacctcgaattgcctgtcacttaactattttcacactccacaggagactgatcttctgcatttttttttcatgtttctcaaacggggtctcaagtctacccctcaacccccattcctccagcctaactctgtcttgcagtaaaatactaaatttccagtttcttctgattatcccaaatgccaactttccctctctaattcacattattatctgtttgtcctttagggtacatttttgatactgtattttaattatttttttacaaaccattgggtgggacatttaaaaagatttgttttctgtttgtaaatatcgcccatgaaaataaaccaaaactaattccctgacactgtattgtaaaaaaatctctgtgcctctttttcttttgtctcccctaggcacagagatcttgtgaaagtgttttggggtcaagtttgttttttgttttttttttttgtttttttaatttttatgggatgatgtattctcagccaccctttagttttttcctggtcctggttttcagtactggctgtgaataaaccagggtacacaccatggctatgtctgctagagtgtttgatgattattagcttctgggtcattttctctcacaggacaacaagaggtatgaagtgtagtctctcaagagagcaggtggatgccctggggctaagaggaatctcctggtgtctttgaaaagctaaccacttcagacattaacattgtcttcacccaacctagcttccctttcttagagacacattgcgggtcagccaatcttatgcgggtattgagggaaaaacagaagtgatttctgcccctcggattctctgagattcatggaaaaaatagtatccaaatggcagattttacctattcttttatttggtagcattctacaaccaaatgttgtagataatgggtgagttacaagatttatgaaatcatcggttgttatttttgcagggtaaatttgtgacagtgaatatctctgttctctatcctgttatcttaatttctgagtttaatgctaaattttataaaaagaaaaagaatcatctgcaaacagagattgttttaatttcctctcttcctgtttggatgtgttttatttctttctcttgcctgaatgctctggccaggacttccaattttatgttgaatagtgggggtgagagaaggcattcttgctccagttttcaagaaggaatgtttccagcttgtgtccattcagtatgttggctgtgggtttgtcatagataactcattattttgaactatttgccttcaatgccaagtttgttgagggtgttaaacatgaaggatattaacttttattgaaaactttttctgtatcgaaataattttgtggtttttatctgtagtttgtttatctgattaatcaaacatattgatttgtgtatgttgaacaaaccttgcatcccagggatacaacctacttgatcatagtggattagctttttaatgtgctgctggatttggtttgctagtattttgttgaagatttttacatcagtgttcatcaaggatattagcctgaagtttcctttttttgttttatctctgccagattttggtattagaatgatgctgttgccaggagcagtggctcacgccatctcagcactttgggaggctgaggtgggtggatcaggaggtcaagagatggagatgatcttggccaacatggtgaaaccctgtctctactaaaaatacaaaaagtagctgggtgtggtggtgcacacctgtaatcccagctgctcgggaggctgaggtaggagaatcacttgaacctaggaggcagaggttgcagtgagccaagatcgcgccactgcactccagcctggcgacagaatgagactccgtctcaaaaataaataaataaataaataaaaagaatgatgctgcttttatataatgagttggggaggagtcccttcttctcaattttttaaaatagttttgtaagatataatacttgtttttctttgtacatttgttagaattcagctgtgaatctgtctggtcctggactcactttctttcttttttttttttttttttctcaggcagagcctcgctctgttgcccaggctgaaatgcagtggtgggatttcggctcactgcaacctccacctcccaggttcaagcagttctcctgcctcagcctcccaagtagccaggactacaggcgggtgccaccatgaccggctaatttttgtatttgtagtagagacagtatttcaccatgttggccaggctggtctcgaactcctaacctcaggtgatcctcccacctcggcttcccaaagtgctgggattacaggcatgagccagcacaactggctggtcctgggctttcttttggttggtaggctgtttactactatttcaattttggagcttgttattggtctattcactgattcattttgttgtttttgttcagttatgggaagatggatttttccagaaatttatccattttttttttttagattttctagttttcacagagaagtttgtagtagacttcagtacttattcatatttttgtggggtcagtggtaatgtcgcttttgtcatttctaattgtgtttatttggttcttcttttttcactaatcttattagtggtttattaatcttattaactttgttataagataataagataagtggttattatcttattaaatttttcaaaagatttaactcaatagatttcttatttgtatgacttttcatgtctaaatctccatcagttcagatcttcttgtcttctgctagcttaggagttggttttctcttgcttctttcattcttttatttatgatgttaggttgttatattgacctctttctaactttctgatgtgagcatcaaaaagtgctatacatttccctcttaccactgtcttagccatgttgcagagattctagtatgttgtatctttgttcccatttgtttcaaaaaactgcttaatttctaccttaatttcattatttattcaaaagtcattcacatgcagattctttaatttccatgtaattgtataatttcaagtagttttctttgtgttgaattatatatttatcaagctgtggcctaagaatgtgtttggtatgatttgggtattattaaatttgctgataattgttttatttctgattgtgtggtcagttttagagtatttgacacgtggtggtgagaagagtgtatactgtgtagatttcagatggagagtgttgtagatgtctattaggactatttggtcaagcatttagttctgatatctttgttaattttctgcctcagtgatctgtctaatagtgtccatggggtgttgtaggagtcagaatctaaatctcttcatagttctctaagaactttgtgtgtgtgtgtgtgtgtatgacagagtcttgctctgttgcccaggctagagtgtagtggcacgatctcggctcactgcaacctccgcctcccaggttcaagagattctcctgctgcttcagcctcctgagtagctgggattacaggagtgtgccaccatgcctggctaatttttgtattttcagtagagaccaggtttcaccatgttggtcaggctggtcttgaactcctgacctcgtgatccacctgcctcagcctcccaaagtgctgagattacaggcgtgagctgccatgcccagcagaacttgttttattcatgtgcgtgcatggatttttaataacatattttttctgtctgctttttttcataaacattctttcaagtgcataccgtatgcccaaggctacagcttagatgtctgcatccagtgtctactgaagttcagatgtccagtgttcaagaacatgtccagagacttggctgttgtagaaaaaagtataaattaaagataagaggctttattctcttacgtgaaagtaagggaggatattttgttcatctctctttttttaaaacatttagattacacgtagatagttttctctgctttttagaaatatatgtaaatcatagtaacagctatataaaccttttgttattctttctgactcagaattgtcttcatctaggacctcagaaccattgctttgtttttgctttggcaaaggtttttttttgtttttgtttattttcatttttagtcttttaaagtagacacaaatttgtttaaagctttttttttttttttttttttttttttagacagagtttcactcttgtcgcccaggctggaatacaatggcacgatcttggctccttgcaacctccacctcccagttcaaatgattttcctgcctcagccattcaagtagctgggattacaggctcctgccaccacccttgactaatttttttatatttttagtagagactgagttttgccatactggccaggctagtctcaaactcctgacctcaggtgatcctcctgccttggcctcccaaagtgctgggattacaagcgtgagccaccacatcgggccgtttaaagcttattttaagagcacacaaaagttgagcacaaagataagattaaatttagcaacacagaatgataaagaataaaaaagatactgagtaaacttttttgacagaaaactgattatccaaggtaattatctcatatttgcaggctaaagtacttacactgcaaaggcaagaacagttcagtttattcactaaatagtggaatctgtaggtggactttggtttctgttacttcagaacaattagtatagttaggtgtagtgtttgtagacaacttgcattcacacaaattaacattttgtataatagtatgaatataaggctacaatatttgaataaatccctttagtcattttaatattgttatttatactcttgaaatataaagtgttttaactgaattatggttatagatatttttaaagttctacatacattatgacaagtacattaaaattatttatacttagatatttatatctaatatccaaagaaaattcactacaaaattgttacagttgttattagtttgacatgcttattaatttatccaataggataattataggtaagcattgttttagtgtctttcatttcactgaatttgaatgctgcttttacaggacaaataaacataatgggctatgtgaccacccaaaaccataatagctcttcagttagctatgttgcaagctcaaatatattccactgtataacaaagtcagattccagtttttcatcaaaaagtgctggtgaaaattgtcagatgtattccaatatagatccccaattcactggttaggagatgggagagcagcagacatgaaaaagaaaccttataggccagacacggtggctcacgcctgtaatcccagcactttgggaggccaaggcaggtggatcacgaggtcgggagatcaagaccatcctggctaacatggtgaaaccccgtctctactaaaaactacaaaaaattagccaggagtggtggcgggcacctgtagtcccagctacttgggaggctgaggcaggagaatggcctgaacccaagaggtggagctttcagtgagccgagatcgtgccactgcattccagcctaggcaacacagcgagactccaagactccatctcaaaaaaaaaaaaaaaagaaaccttataaaattctgctgagaacatgcctttttttttcataatgctcatgtttctcatgctgagagtagccatgcattttgagtgtttcaagaaaaattccttttgggggactatcttctggccaagttgatcagtcttacatctaatctgagttttttcttaagatgcttttagcttattttttctttcaatataatcttgctcagattgagagctgtttttctctccaatgctttgggtgtctgtttcagaaaccctattagtatcccatggtctctgtgaatgaggtgggttgtcacagggagaatattcttggagttatctctatctggattcatgctggaaatctagcagtacttttttttttatgtcacccttataaatagaaactgagggtgaaatactgctcccattcccattactgtgaaggtgcagttctacccaggaggcctgcagtctcctctccctgcagcgcaggctccactctctgatgtgacactagagtactgctgtggcattggggttcatgtaagatgtgaaccagcagctttgagctgtgtgttgtgggctgtgtttcagtggaagttggtaggcgtaaagagaggacactggccactaggagaacgcaagcagggtgctgcatgttctacattctgtgagaggttccgagagtaaatagaatctgatggccaaatctgtaaatgtaaacaagcatcttaggagtgaaagatcaaggctacaaagtatccagagccataaccacaactatacctaccagtaaaatgcaagactggaatacagtattgttgtccttcctcttactgaagagctagaatcaggacaggtgatccaggttctggagctcgaccagagcagttccattttttatttagaatcagcctgagtctctcctgcctggcttatcattgggcaatcaacccagggtaactgggaaccctctcacaattacctagccatctttgaaacatttgagaatatccagagcagaattttatcaggctgacaagagtggttaatgctacttctttctcagtgtaaaagaaatgagtcattctgtgtttgttcctccctcatacaagagataattttggttggtactcagatgatagtttccccagttttcttgtacttgggtgaaaaacaaggaagaggtctagaaactaaaacagataaactgattgctttcatttcatattatcattagaaaaataggtagagcagttatggttcttatcatacagaaacttttagtctagactagtgatatggcttggctatgtcaccacccaaatctcatcttaaattgtaactcccacagtttctacatgttgtggtaggaacccagatggaggtgattaaattatgaggggaggtgtttcctgcactgttctcatgatagtgaatgagtttcacaagatctgatgattttaaaaatgggagtttccctgcacaagctctcgttttgcttgccaccatccacgtaagatatgacttgcttctccttgccttctgccatgattgcgaggcctccccagccatgtggtattgtaagtccattaaatctctttttcttcccagtctctggtgtgtttttatcagcagtgtgagaacagactaatacaaaaaattgttaccagtagagccgggcattgatgaaaagatacctgaaaatgtgcatgtgactttggaactgggcaacaggcagaggttggagcagtttggaggtctcagaagacaggaaaatgtgggaaagtgtggaactccctagaaacttgttgaatggctgtgaccaagatgctgataatgatatagaaaataaaatccaggctgaaatggtctcagatggacatgaggaacttgctgagaactggagcaaaggtgacttttcttatgttttagcaaagagactggtgttattttgccccttccctagagatttgtgaaactttgaacttgagagagatgatttaggttatctggcagaagaaatttctaagcaaggcaggtctctgttgagccatggatgccagtctctgttctgcaggataggttttgttaaagttgttaaaaataatgcctattttaagagataacaaatgaaatttagaggacaagaggataaagctaattactattcttggaaatgcttgatgatacaggataaaaataaatacaacacacccaaatacaggatgatagtttttttgttagttgggttttttaaagcataatgcaggagtagatttattatagctactccaaatgttgaagagtgatacagtgaccacagagttaaaaactctcactgttattgctgtttattttacaataattggtttagtctacaagtttaaggcaaacatactaatgcatttgcttttcttcagaaatcataaagattacataaaatctgtaccaaaacttctaagaaatattcagtagttaaaaataagtctgattaagatgctttaccaggatacatgaatgaactaaggtggtatataatgcttttttaaaacaaaattttaaaaaattctgttttaaaggcaataaaggcaatctttatcttgtttgaacaatgcattctgaaaaggttaaacttcagaaattatttaaaggtaaataagattggcatccataaggaatactatttataaaataaatgcagttatagaggctactttaaagaagaataaaacttggacttctgagtatgatgagtgcacaataatgggccactatcttggggaacacagtgcggcattacaccacacagactggcatcgcctgtacatggtgctgctccatgcttctcagaaaaagagtagatccattttgtcagctgttttttatttgtttccagtgagcataaatgcgtaacatcattaagaaaacaaaaataaaatttgaaggaaggcagcccttttcaacaggaaggcagaatgtggcttatgtgtctccgtttagcactgccaggcagtttggcagcaactgtaggttaccctttgcatgcttcagttctaactctgccagttccactagtttttttttttttctgaatgcagcaatgcttcttgtcttaaaatctataagttcttgttttgcagactgagatttttttttttcaaatttctgactacataattgttgggaagttttagccagcagaacatctttattttttgctcttgctttatccagtgctatattagcattttcataatccagtagtgacctagaccttcaatacaggagatccttagcagcttgagtttctcttaagtaatatttttaagggtcagaaagtttgaggtcctcatcagcagacactcatgcttctatttttcttgttttatcaaacatttctgaaactttgagaaaaaacttgcgtatatctgtagaatcccgagttcctaaagcatataatgaagaaccaattctattgtaataatctgcagcacttttgtgggatcttgtccttctatgagttagcagatgcatccttatctcggttatgatattctaaaagaaatgtttgttcatgctcaaagaaattatctacatcctttactccggaaataattactccatctgctgatttaaccatgtttttaaagaaatcttcaagtttctctttttatttttccttgcacactcaaatcttgattatattccaagaagacatggaaatttaaatattttctcaaaataggatgtgctgtcacatgacataggaacacttcatgcatcacaactgtgttcttggatattcccaaatattcagcttccagttcctgtttcatctttgtgaattcttcctttgtcattgacccttctccttctccaagcttctgtactttttcccttgaagcatcaaaatcagctcttggtggtgctggtggaatgatgtaacctgcatagtcttcatttttaacaaaggaatcatgaagccagataaattgctcatgttgctgaacaacagaaaactcattttgtttaaaatttggcaataaactctttgtgtgaatggtgaattttactttattccgctcactaagagcatcagaaatgtccaccagcagagcaggatcactttgaagatctacatttattgctttaagtccacagttctcttcctgagaggaagttagggccatcgtccaggtcttccatcctggctgctccacaggatgatagtttgtgtaacaaacaaatattgtcagattgcttatacccgtatagaagaggatgtgatattacacacagcatatgctcgtaaactgccaaaatatgatgtgaaggttggcctaaccaattacactgcaatgtattgtactggcctgctgctggcctgcaggctcctcagtaggtcaagatctgtgacctatggcatggacaagatctgtgaaggccaagtggaggtgactggcaatgaatacaatgtggaaagcactgatggtcagccaagtgccttcacctgctatttggatgtaggccttgccagaactaccactggcaataaagtttttggttccctgaagagagcagtagatggaggcttgtctatccctcacagtaccaaacagttccctggttatgattctgaaagcaaggactttaatgcagcagtacaccagaagtacatcataggccagaatgttgcagattacatgcactacttaatgaaggatgatgaagatggttacaggaaacagttctctcaatacataaacaaaagcgtaactccagacttgaaggagatgcataagaaagctcatgctgctatgtgagagaatccagtctatgagaagaagcccaagaaaaagaagtggaaccatcccaaaatgtcccttgctcaaaagatcgagtagctcaaaagaaggcaagcttcctcagagctcaggagtgggcttctgagagctaatccaaacaattttcaatgaggattttttagatgaagaaaataaacttattgacagcaaaattttaaaaaaattaaatttataagcagcaaagcattcaagagattacttgggttctgttaagggcattcagttttaaaatggaaacagagcataaaagtttggaaaatttgcagcctgacaatgcaatagaatagaaaacctcattttttgaggagaaatttaagccagctgtgggaaaaatgtttccagttcatgacagaggtcttctctgcagccccttccatcacaggcccagaggcctaaaagaaaaagacggctttgtgggtcaggcccagggctcccctgctctgtgaagcctagggacttggtatcctgtattccagccactacagtcatggctaaaaggggccaaggtagagctcaggctgttgtttcagagggtggaagccccaagccttggcagcttccatattgtgttgagcctgtgggttcacggaagtcaagaattgaggtttggcaccctccacctagatttcagagctatatgggaacccctggatggccaggcagaagtttgcagcaggggtgaaggcctcatgaagaatatctgctagggcagtacagaaaaaaatgttgggttggagaccccacacagagtccttactggggcaccgcctagtggagctgtgagaagagggccattgtcctccagattccagaatggtagatccactgacagcttgcaccatgtgcccggagaagccacaggcactcaacaccagcccatgaaggtggccaggagggaggctgtaccctgcagagccacaggggtggagctgctcaagacgatgggaacccactttttgcatcagcatgacccaatgcgggacatggagtcaaaggagatcattttggagctttaagatttgactgccctgcttgattttggactcgcatggggccagtagcccctttgttttggccaatttctcccttatggaatgactgtatttacccaatgcttgtatccccccccccattatatcagggaagtaactaacttgcttttaattgtacaggctcataggcagaagggacttgccttgtttcagataagacattgaattgtggacttttgagttgatgctgaaatgagttaagactttgggccgggcgtggtggctcatgctagtaatcccagcactttgggaggccgagacgggtggatcacgaggccaggagattgagaccatcctggctaacacagtgaaaccccatctctactaaaaatacaaaaaaattagccggatgtggtggcgggcacctgtagtcccagctactcaggaggctgcggcaggagaatggcgtgaacccggaaggcagagcttgcagtgagccaagatcgtgccactgcactccagcctgggtgctggagcgagactccgcctcaaaaaaaaaaaaaaaaagactttgggggactgttgggaaggtatgattggttttgcaatgtaaagacattagatttggaggggccaggggtggaatgatatggttttgctgtgtccccacccaaatctcatcttgaattgtaattctcacaagtcatgggaaaaacacggtgggagatgattcagttatgggagtgggtcttccctgcgctgttctcgtgatagtgaatgaacttcagaatatataatggttgtaacaacgggaggtttcctgcacaagctctctctttgcctgccactatctatgtaaaatgtgacttgcttctccttgtcttttgccatgattgtgaggcctcctcagccacgtagaactgtaagtccattaaatctctttctcttcccagtctcaggtatgtctttatcagcagcatgagaacagactaataaaactagcaactgaataaaggttgaattatgcatcatatggtaggtaaataaatgtgtgcaaaaaaaacttgggctttatttcggccatgttctttatattgttgtgacttttggtgttttcacctgaaggaatatttatgaacagaagggttgttatgattatttgtatttcttttaccttactaaaaatacatattcatcttttaataaaattatccgcggaaaccttaaatgatttgtttaaatggcttattagtatatgatataaaattgacagggaagtgactataaaaggtttaaattacacaaactctgagatttaaatttctcttaggtaagcttaggaaaaacaaaactggaaatatccccattggcatacagaaccaaattctagctagggtccactccctgccccagttctgttcagatttaccccttttgaaggccttatttaagtctggccctaccctggagtctcatctcacagaactgattagaaaagatcagttttgggtgatgaatcctgttccatttttagagctggtgctcacaattttctgaaacagaaaagcagataaatgagaaatataaagtatgaattttagggtctttttaaaattattaaaaccagtgcttgcagagacattttatttagcaacttgttttccattcctgcagatctactcgttgctccccaagccacaagaagtaaatataaaaacaataaaaatttctgtaaattatattaaactcttcatttctctattcctctcatctgtttatgtttagtttttattctacacatttttttaaaaggtcaatgacagagaaacagaaaaaaatatggatcatttttctaaatactgggaattattgaacacttagtatcaacacacagggtgttattaagattaaatcctgtaatgtgctatcacagtgccctgtagcatcttattgagcttgtagtacctgaataataaacattgcattactgcatgtgtatatgttgttttctaaatgcagacttaaacgttgctttctaaatacaaaaacaaaaaacaaacaaaaaacattgttgctttctgtttcttctgtaaactttaaaaaagccagcaaagattataatactttaaggtggagattgattgtctttatttgtaccaaaagtgtttgtattgtcacaagagtgctgagtgtaatgaactctgtgctgtgcctgcttgctctaactaatgctaataatgaccccaggtggagaaacatcagcattgataggaaacttgtttataacacccattcctgtatcctttcaaaacctgcagaatcacatttcatagagtagggccaaaattaccaagtgatttataagctgttaaagctggagaggcaatgcttagttaaatggttataagcccaggcttctaattagaatcatgtgactctaagttgaggccagaatcaagtatgagggttcaagatacatttatgatagttaagtctcatctttgcactaaagggtggtcccagaacctgttctgtttgggttgcataggaacagggcagtgtggcccacgtttttcttaactgtagcagaaattgctggtgtctgtggcaggggagggcacctgaggacaggaaaggagaaacatatttttacatctgtggagcagcttattgttcctcaatctcttctgttataaaggacagaaatgggtagagtttttctgtattggtccttctacctatgagtgtggtggtagcaggtaaagatgtggtgcttacattgttaaggcatattctccagatgcagatgtaatttgtttcaaaaatctcatctgagaagaaattccagagaaagacgagaagagaaaaaatggctttttttcagctaaacatgccttggagtaagggttgtgtccactctgcctgctagaatgccatgcctttagtacttgccaaactttaattctctacttgtgcttttcctcttaaatgagtttgttgtaactacgttttaaaattcttataatagtcaaggatctcagagaaatatttctttcctatgtaccagagccttctctacattctctacatcatggcttcttatatgccatgattctcaccatgaatttataatctgcaatattaaaaatgttccctttgtggctgttgaacatgggaaggtgtggatgctcaagattcctattggggaaacgccagggttcttagtaaaaataaagaccatgtaatgttgaggttctgtctgtgttctccatcagctctatgtagagaaggattaagaaaatgcttatttaaacagggtggcatttattacccagtaagttctgaaaaaaattattaggagatacttgttctccatggtgctaaagaaagactatttaaaataactattaactattaacaattatagaacatgggaaatatctgtattttgaactttgcataaaactgatgtttctttgtagttaaattcaggctgtaatttacttttggagggccactattacaacagtgatgctgtgtcctgtgtgcatcagcacatcataaaaatttgccttagtccagttgatattagtaactcacttgattaatgaagctgacagatttcttcaatatggagttaattatttttctcttcattagtagtttctttatgcagctgatgtgcagaaaccatcacatttaatctggcagctgcccttcttatgttttctttgcctttatctgcctatggaaaatgaaagctctaatgtttgttacaggccagaaaaactggaaaaaaaagactacaggctcttccagttactccatatttgacaaaatagccttcttgggccataaatattggcatcactggtcatcttgtgttttttttgttttttttttgtttttgtttttttgagacagtttcactcttattgcccaggctggattacaatggcacaatcttggctcactgcaacctctgtttcccaggttcaagcaattcgcctgcctcagccttcccgagtagctggaattacaggcatgcgccaccatggccagctaattttgtgtttttagtagagatgggatttctctgtgttggtcaggctggtcccgaaatcctgacctcaggtgatccgcctgcctcggcctcccaaagtgctgggattacaggcatgagccaccgcaccaagatccagaaactcaggctttattccagaccttctgacacagactgcattaacaagatcttcagtttattgtagacattacaatttgagcagtaccttctaactcaatgtgacttttccatctgaaaagtttacacaactctttctgtatgatgtaaatataccactcaaaaatgtacatgttagtgttcatgtcttacttcatcatctggaaaagtatcatataaatactgatattttggatcttatgccaatctcttttctcagagttagagtatattttcacagagtagagaatatttctgtgttgaaggttattagataatttcagtcacccctataagtaagacccaattatatttactcttatttcaccttgagtgaaacttaaaattctgcccaggggcacttggtaaatatgtgtgtttgtttgtgtttttcagggagcgttgacatttagagatgtggccatagaattctctctggaggagtggcaatgtctggacaccgaacaacagaatttatatagaaatgtaatgttagataactacagaaacctggtcttcctgggtgaggataactttaatatacaattcctaatataccctatagatttcatttatttttgtaaaaattctgtgctttcagatcccgggtttttttctttttctttttctttttttttttaagtcctcaggatttgtcccctgcccctctgcccggccagccgccccgtccgggagggaggtgggggggtcagccccccgcccggccagccgcccagtccgggagggaggcggaggggggtcggccagccgccctgtccgggagggaggtgggggggccagccccccgcccggccggccgccccgtccgggaggtgaggggcgcctctgcccggccgcccctactgggaagtgaggacccctctgcctggccagccgccccgtcctggagggtgggggggggggtcagccccccgcccggccagccgccccatccaggaggtgaggggcgcttctgcccggccgcccctactgggaagtgaggagcccctctgcccggccacgaccccgtctgggaggtgtgcccagcggctcattggggatgggccatgatgacaatggcggttttgtggaatagaaaggcgggaagagtggggaaaaaattgagaaatcggatggttgccgggtctgtgtggatagaagtagacatgggagacttttcattttgttctgtactaagaaaaattcttctgccttgggatcctgttgatctgtgaccttatccccaaccctgtgctctctgaaacatgtgctgtgtccactcagggttaaatggattaagggcggtgcaagatgtgctttgttaaacagatgcttgaaggcagcatgctcgttaagagtcatcaccactccctaatcttaagtacccagggacacaaacactgtggaaggccgcagggtcctctgcctaggaaaaccagagacctttgttcacttgtttatctactgaccttccctccactattgtcctatgaccctgccaaatccccctctgcgagaaacacccaagaatgatcaataaaaaaaaaaaaaaaaaaaaaaaaaaaaaaaaaaaaaagtcctcaggatttgtccatgtagaaaagaatttcaagatgttttattttgacctgaactttccactttcctgagctgatttgtttccttcactctagattaggattaattttagaaatttagttgcaacatattgttgctcacatcttaaaatttaatcaccatcaccaatttttgaattagtacaaagtagttaaattaagaacctataaaattaaaatatttttaaatatttagaaatttcttttctttattttttttatttttttggagacagagtctcattctgtcacccaggctggagtgcagtggcacaatgtcggctcactgcaacctctgcctcctgggttcaagcgattctcctgcctcggcctcttgagtagctgggactacaggcgtgtgccaccacacctagctaattttttcgtatttttagtagagacagggtttcactatgttggccaggctggtcttgaactcctgaccttgtgatctgcctgcctcagcctcccaaagtgctggtattaaaggcatgagccaccgtgcctggtctatttagaaaatttttataaattattattttggggttaatttactagaatattccattacattctctttactgagagcattactaagttggtaattggagaatatgagcaagattcatgttatttttcataaaacaggtattgctgtctcaaagccagacctgatcacctgtctggagcaagaaaaagagccttggaatttgaagacacatgatatggtagccaaacccccaggtaggtgacagtaaatacaatacacaaaactgataagagatctatagtttaaaaaaagaaaaaaaaccagtttttaaaataatttgggaagctgttttacaaaggaaatagtttctgtttctttttatttattttgctttttatttattttttttcctctcacatagaagcatcttttgttttatcttttttaaaatctctaaaaattctttccctttggtaatcttactttacagtgagagccaaagtccatttcatggcatataatagactgcacaatctcactgcttttccattgtttctggaaacacacagatatttgaataattttgagaaactctatgttgaactatttttattttatttatttattttttttgagacggagtcttgcactatcaccagggctggagtgcagtggtgcgatctcggctcactgcaacctctgtctctcggattcatgtgattctcctgcctcagcctcctgagtagctaggattacaggcgtgcatcaccacacccagcaaattaaactattttttaagttatctttttgcattatgtctgaaatgtgtgagaatagtggtttctgtttcatttatttattgctaatttttctgcatattccatgccgttttattactatagttttgaaatatagtttgaaattatacagtatgatgtcctcctgcttttttttttttctttcaggattgctttggctattcaaagtttattgtagtttcatgtaaattttggaattgtattttctattaccttaaataactggaattctgatgggagtttattgaatctagagacaccttagataacaaggcattttagcctgggcatggtggctcacacctgtaatcccagcactttgggaggctgaggcaggtggatcatgaggtcaggaattccagaccagcctggccaacatagtgaaaccctgtctctactaaaaatacaaaaaattagccggacgtggtggcaggcacctgtaatcccagctacttgggaggctgagacaggagaattgcttgaatctgggaaatggaggttgcagtgagccaagactgtgccactgcactccatccagggcaagagagtgagactctgtcaaaaaaataaaaattaaaaataaggcactgcaacaatatttattctttccattaatagacataaaatatttttaaatttatttgtgtcttctctaatttttttaattgatatatctttcatttaaaatattttttagttccttggttaaatttgttctcagaaatttattttagtgctattgtaaataaggttactttctttctatattttatcagatagtttaagtgtatggaaccataacgtatagttgtatgttaattttctatttgctaatgtattgagtataattattactttaatcaggttttaatgtactgtttatggttttttatatataaagtcaaatgctccagaaccagcagcttcttacttgtcttcaatgtcagtgactttaaaaatttattttgactaatttttctgccacgtaccttcagtgctatgtttaagtagaagcattgagaatgggcacaatatagttttgctttgttctctgtgaattttaagaagcaaacacctcttcaggtttttataaactggcttcaagatgtaaagatattcttttgttgggtgcccagggtgatagaatgccctctgggcttatagtggagaggggttgtagcttggtaacaaggctgctgggtcttcactggggtccaactttagttgacttgttacaaggggcttgggtagttataattcccattatatttttgggcagagtgaatatcctttaggactttgctctgtagggtagacactagggcaggtttctgcaattggttgtgcatatatggtgggctttatatcaaaatgtagatgaaaatggctttcacggccgggcgcggtggctcacgcctgtaatcccagcactttgggaggccgaggcgggcggatcacgaggtcaggagatcgagaccatcccggctaaaacggtgaaaccccgtctctactaaaaatacaaaaaattagccgggcgtggtggcgggcgcctgtagtcccagctacttgggaggctgaggcaggagaatggcgtgaacccgggaggcggagcttgcagtgagccgagatcccgccactgcactccagcctgggcgacagagcgagactccgtctcaaaaaaaaaaaaaaaaaaaaagaaaatggctttcactgggtaccagaaaggatttccccaggtctctgtgtgggtttccatgtaggtagagctgaccatgaactgtggctcaaagagctggaactgagtcatgcaagtgcttcggggaagacaataaggaccaaggtctgcagtcttgtctgtgtggctataaatgagtgtctttctccaggcctctgaaaaggcaggacctcttccagactttggctgggaagagttttggatggtttcagagtaagttcaaaattctcagtgggaccaagttgggtggataattttctggtctgtagccaagaacaggggtcctgttgtttgccacctgaatgaaagcctgccttctaaaaaggatgctcctcaatcttgggcattagcagagtttcacaacttccttcctgaatctcagagctctcttaaaggcacttattttggagatggggtcttgttacataacccagactagtcttgaaatctttgcctgaagcaattcttcagccttaatgtaccatgtagctgtcattacaggtttgagccatgatgcctgtttctctcataaaggcattttttttcagggattgctgacagattttcttgctgtaggaaaataagcaaatagggcaccttttatttttccatcttactgatgtcactctccctgtacatttttactttctatttcaattttgtgtgtaattttagattgaaacatttagggaaatatactagaattgacatgttatgtctgaagtaaattagataattagtaggcaggcaggcaaaaagaaatagacaggcaaaatggaattataggattttcacccatgtttgtcagcctatgtctaaaaaataacatgatttattctcaaatatttggtttatatatcagagatcctaactatattctgcaaaaaatatatttttttttctttatttagcattgtaaagctattctttgcttctaagcttggattacagcagtttcattttgtgtataaatagcatatatttaaaacttaaaaattatttttagtttcttttaaatgtttatcaaaagtttttcatagaatcttctatttataattatactgcattttatctgaaattttactaccatatagtggatgccagtgattcaaaatacctttcctccatgagtacagtttcagtctaatattgcattatctagacaaactctttttttgtttttattttttgtttttttctgagatggagtcttgctctgtttcccaggctggagtgcagtggcacgatctcggctccctgcaacatccacctcctgaattcaagcaattctcctgtctcagcctcccgagtaactgggactacaggcacctgccaccatgcctggctaatttttgtatttttagtagagacagggtttcaccttgttggtcaggctggtctcgaactcctgacctcaggtgctccacacacctcagcctcccaaagtgctgggattacagacgtgagccactgtgctcagctgacaaattctttttaatgctacatcaacgttgcataccagattttatgagtaagcatttctgttattattgttttgcagttccatatcagtgtgttttttcggtgtgggtttcctaatatcagtttattgtgtttgctggttttacagttttaggcggtttgcaactctgtttgtacatataagtcaatgtgggatataattaagagataaatcagccatatgtttatcacaatcagattatgtgtgtgtgtgtgtgtgtatgtgtgtatctataaatatgacccctactttggttatggcacatcttatatatttttttttctcagcagattttccatggtgtttttttcttgtgtaagtgagtagtcatgaaagtagttttattttcaccttgtgtttaataataaatatttcctttgagaaaaacacttttgtgacttgaaggtcatatttgaaaaaatttataattttgtatcttttaatttattctttttaaaaaatagattggttgtggtggctcgtgactgtaatcccagcactttgggaggccaaggtgggcagatcacttgaggtcaggagtatgagaccagcctggccaacatggtgagaccccatctctactgaaaacacaaaaaattagccgagtgtagtggcgtgcacctgtaatcccagctacttgggaggctgagacaggagaattgctttaacccaggaggcagaggttgcagtgagccaaagtagcgccactgcactccagcctgggcaaagcaagactcggtcttaaaaaaaaaaaaaaaaagatgtaaaaacatataacctaaaatttaccatcttaaaactatttaaggccgggcgtggtggctcacgtctgtaatcccagcactttgggaggccgaggcaggctgatcacaaggtcaggagttcaagaccagcctcaccaatatggtgaaaccccatctctactaaaaatacaaaaattggccaggcatggtggccagtgcctgtagttccacctacaggggaggctgaggcaggagaatcgcttcaacccaggaggcagaggttgcagtgagcctagattttgccactacactctagcctgggtgacagagcgagattctgtctcaaaaaaaaactaagtattcatttcatggccagtcatggtggtgtttcacatctgtaatccctggatattaggaggctaaggcaaaaggatcgcttgagccccaaaatttgagaccagcccaagcaatatatggagaccccatctttccaaaaaaaaatttaggctagatgtggtggctcacgcctgtaatcccaacactttgggacgccgaggtgggtggatcatgaggttaggaaatcgagaccatcctggctaacacggtgaaaccccgtctatactaaaaatacaaaaaaattagccgggtgtggtggcgggcacctgtactcccagctacttgggaggctgaggcaggggaatcacttgaacccaggaggcagaggttgtagggaggtgagatcacgccactgcactccaacgtgggtgacagaatgagactccgtctcaaaaaaaaaaaaacaattttaaaataaacagacatggtgttgtgcacctgttatcccagctacttgggagattaaggggtaaggattaattgagcctaaaagtttgacgttgcaatgagctgtaattgtgccactgcactccaccttgtaatctgtagattgcattgagcaggatagacacatttacaatattaactatttcaacctttctacaagagcacaatcaagagtgtgttaatttttatatatttgtgaatttttttagtttttttctcattatttatagtctcattccattttggtcatataaagtaatttatacaattttagttttaaaaaatttggtaagactttttttttggcctaggacgttgtctatgaaggaaaatgttctatgagctattgataaaagtgtgtatcctaaggttattgatgggtgccctctatacctttgttaggaataattgttttatactgccttcaagttgtctgttttcttactaatattctgtcttgttttatttttattacagaaagtgcaatattaaagtatacaataattatattgctctctatgtgtttcttttattctgtcgatatttgctttatatgtttagagccctaatgtgagagatatatatactcacacatacacacacagaaacaaacacacacacatacacagaaacacacgtgtatatacaaatgtttcataggttcccagtgaataaatctataattttttgaggtcctattttgtctctttagagttttgacttcaagtacattttataaaacatgatagtttttaacttaagatgtagttgcataatattattttgacctcttctgctctcatttgattaatatttgcatgaagcatctacttccatcttcccactttcagtctgtttttatcattagatctcaagtgacttgtagaaaggcaagttggatcttggtttttaaaatgtttaataaatctatttattgaaagtatgtctcttggccaggcgcggtggctcactcctgtaatcccagtactttgggaggctgaggcaggcagatcacaaggtcaggagattgagaccatcctggctaacacggagaaatcccatctctactaaaaatacaaaaacaaaaattagccgggtatggtggcgggcgcctgtagtcccagctacttgggaggctgaggtgggagaatggcgtgaacctgggaggtggagcttgcagtgagccaagatcgcgccgctgcactccagcctgggtgacagagtgagactctgtctcaaaaaaaaaaaaaaaaaaaaagtttatctctcaatttgaaagttaattatatatatttttaaataattttatgaaagagaaagacttactgttattttattattttgattcttgcatttttgtccctcattttctctttttgtctttctttgtgtctttttgatttttgtattgatatggttttactaatttcttattctctttgtgtatctatacagatattttctttgtggtaccttggggattacataaaacctcttaaaaaaaacaagagtagccaggcgtggtggctcacgcctataatcctagcactttgggaggccgaggcagatggatcatgaggtcaggagatcgaggccatcctggctaacacggtgaaaccctgtctctactaaaaacacaaaaaattagccgggcgtggtggcaggcacctgtagccccagctactcaggagtctgaggcaggagaatggtgtgaaccccgggaggcggagcttgcagtgagccgaaatagtgccactgcactccagcctgggggacagagcgagactccgtctcaaaaaagaaaaaaaaaaacaatatatttttggtttggtaaaaaattaacttcaactgaataaaaaattcttccttattacatctgccttgaaatttgtcattgatgttgctaccatctttttatgttgtatatttattaacaaatgtttataataattgctatgcttttatctttcaaattttagagaataatttaaaatgttttctgcaccattatgataatgctacaaaaatcctttttttatgtatgtgcatatttttctcagaacataatttgtttttgtttgattatatggtattttcttgaatccttttattttccgtttcaggaactgctttcagcatcttttatatgtttgtgaagttttataagtatatgcagtgccaatatactttttcagaatttggctattttggaacatcattttttcatttttcaggacagatttgctgatggtgttactctcacttgaaagctattttttttcccaggactttgactgcatcacacagtttctttccggcctacaaaatttttgttgacaattcactggttatatcgtaagactatgtttgtatatgacacatcacttttatcttgtagctcccaagatgctctgtgacttttgaaattgtgcttatatatgtatttgttataaatattttgtatgtattctagtttgtttgttaagcttcttcatgtttacattatttttcttactgagggatttttcaggtattatttcttcttgtattttttacccccataatttctattttttaattttttcaatatttttgttcttatcttcatttctgattttctgtagtctgtgttcctgtttcactcattgaatattcaattttttatcaatttttaaaattaatgtgtacatcttttctatggtttccttctgaaaattttataatatttttgatggaattatattgccctgttttgtatatattgtaatctttaattgagatttggacattaaaaaaatctacctgtcacaatctttataatgtagttctgtcctgacatagtctaaaagcaatcgttttggctagacattctgggagtctctcacacatgttcttaaaatgtgtcttgtctaaaattttgtgtttgcttttagttaaaggagtttgtgtttcttcttaaaaatcagtaggccagttgtggtggctcatgtctgtaatcccagcactttgagaggctgaggtggacatatcacaaggtcaagagatcgagaccatcctagtcaacatggtgaaatcccatctctactaaaaatacaaaaaattagctgggcgtggtggcatgtgcctgtagtcccacctacttgggaggctgagtcaggagaatcgcctgaacctgggaggcagaggtttcagtgagctgagattgcaccaccgcactccagcctgggtgacagagcaagactcttgtctcaaaaaaaaaaaaaaaattagtaatcacttgctacatttgttctctgtctgtgataccacagtctctctgatgctgtaaaacttatttttttgtctcagcaggctcaaattgtcattttaaagtatgccaccatttctttcagaactttttgtcataagagatagaaaccagtgtctagaaaagcccctataaaccagaaataaagatgtatgtgccagtattttaacttgtcttttaaaaaggaaaccaagagttggtaatttacttgtaaagtcactatgttacaatggaggggaggaagagctgtgttgggtaaaatgtaacagactttcttttttcctctatatagctctttgcattgtgttcacctggggcactgtacacactcaacttacttttttacaaatgtactttggatttttgttacatttatatgtttatgaagaaattagggcctgtggtattttgctatgctatcttgttatgtagtttgtataactttataggttaggtttataaactatactcagtctagtacatgcagtaatttgttatttttatttctttcagttatatgttctcatattgcccaagacctttggccagagcaaggcataaaagattatttccaagaagtcatactgagacaatataaaaaatgtagacatgagaatttactgttaagaaaaggctgtaaaaatgtggatgagtttaagatgcacaaaaaaggttataatagacataaccagtgtttgacaacttcccatagcaaaatatttcagtgtgacaaatatgtgaaagtctttcataaattttcaaattcaaacagacataagataagacatacttcgaagaaacctttcaaatgtaaagaatgtggaaaattattttgcattctttcacacttagctcaacataaaaaaattcatactggagagaaatcctacaaatgtgaagaatatggcaaagcctttaatgagtcctcaaactgtactacacataaaagaattactgagaaaaaaccttacaaatgtaaagaatgtggcaaagcctttaactggttttcacattttactacacataagagaattcatactggagaaaaaccctaccaatgtgagaaatgtggcaaattttttaaccaatccacaaaccttactacacataaaagaattcatactggagagaaaccctataaatgtgaagaatgtggcaaagcctttaaccagtcctcaaaccttactgaacataagaaaattcatactaaagagcaaccatacaaatgcgaaaaatgtggcaaagcttttaagtggtcctcaacccttacaaaacataaaagaattcataatggagaaaaaccctacaaatgtgaagaatgtggcaaagcttttaaccgatcctcaacccttaatagacataagataactcatactggagggaaaccctacaaatataaagaatgtggtaaagcttttaaccaatcctcaactcttactatacataagataattcatactgtagagaaattttacaaatgtgaagaatgtggcaaagcctttagccgtatctcacaccttactacacataagagaattcatactggagagaaaccctacaaatgtgaagaatgtggcagagctttcaaccagtcctcaacccttactacacataaaagaattcatactggagagaaaccctatgaatgtgaagaatgtggcaaagcttttaaccggtcctcaaccctcactacacataagataattcattctggggaaaaaatctacaaatgtaaagaatgtggtaaagcctttaggcggttctcacaccttactaggcataagacaattcatacataaaattgtaaagactgtggcaaagcttttaaacaatctttataccttactacacataagataattcatactgaagagaaaccctacaaatgtgaagaatgtggcaaagcttttaaccagtcctcaaatcttactaaacataaggtaattcatactggagaaaaacctacaaatgtgaagaatgtggcaaagtcttcaaccaatcttcacaccttactacacataagataattcatactggagagaaaccctacaagtgtgaagaatgtgacaaagcctttaacaaatccttaattcttaacagacatgattcataccagagagaaactctacaaacctgaaagttttaacagtgcttttgacaacacctcaaacttttccagatgtcaaagaaatgctggtgagaaattctagaaatatgaagaatgtgacaaagccattaaattgttgtcacatttaattgtaggtaaggtgattcatactggagaaaacttctacaagtgtaaacaaagtggcaaaacttttaaccaatgctcacactttattgcacaggacatttatacttgagaataaatatacaagtgtaaagaaagtgaaaaccctattaatatctgctcacatcaactcaacatcagagttcatacttaataaaatcattaaaagtgcaattactgtccaaagattttttcagaaaatataagcctttaaacttcagaagatgatttattttgaagacaaacattgaaatgtagagagttatagtaactttacttgtatcacaatcttattctactcattttgtactagaggcaaaccctgaagccattgctcaaattttgttcgacatcagacagataatttgtattaatgaaaaactctccaaataaaatagatttggagaaaacatttttttcaaaaactacagcttaggaaacttcagagagtttatactaaaatatatttttgtggatgcaataaatagaaaaaaaaatttaatccaaaattaagtttaggtaaggccaggcacagtggctcacacctgtaatcccagtaccttgggatgccaaggcttgcatttctgtaataataattgacattgataatttcttaatgtatctgttggtcatatgtatgtattttcttgaaaaatatttatgcctcttgctcatttgtaacagttatttgttgtttgttgtgtagtcatttaagtttctgatgtatttttgatattaaccccttgacacatgtatgatttacaaatattttgttccaatttttagttgacttgttgattgtgtcagattctgtgcaacagcattttaatttgtagtaatctgactcatttgtttttccttttcttccctgggatttcgaggttaaatttaaaaagtcactgcccaaccaatgttatggggcttttactctattttttgtagtagtttccagttttcaggccttacatttaagtgatttattttgagtggccaggcacggtgcctcagcctgtaaagactgtaatcccagcactttgggaggccaaggcaggcagattaccttaggtcaggagctcaagaccagccttgccaacatgacgaaaccccgtctctgctaaaaatacaaaaattaactgggcatggtgacacccacctgtaatcccagctactcaggaggttgaggcaggagaatcacatgaacctgggaggcagaggttggagttagctgagaaggcaccactgcagtccagcctgggcgacagagtgagactctgtctcaaataataataataataatttattatgagttggtttttatatatgacgtgagatgatagtctgattttattactctacttgtggctataacattttctcaacaccatttattgaagatactgtcctgtctctaagaaatagtcacctttatttaaaatcagttagctgtaagtagatggatatatttctggtctttttttttttttcctgctccattgccctatgtgtctgtttttattcaagtaccatactgtttttgttactatagctttatagtatatttcaaagtcaggttgcatgatatctttacttttttttttttttttttttttttttttttttgctttatttggctattcagggtcttttgtattaccatataaattgtagatgtatttttaaaaatatttattatgtcactgggattttcattgagattgaattatatctgtagatctttttctgtaatacaaatatttaacagtattaatgccaattcaggaataagaaatgttttttattcatgtattaatttctttctttttttttttttttttttgagacagagtctcgctctgtcgcccaggctggagtgcagtggcgcgatctcggctcactgcaagctccgcctcctgggttcacgccattctcctgcctcagcctcccgagtagctgggactacaggcgcccgccaccacgcccggctaattttttgtatttttagtagagacggggtttcaccgtgttagccaggatggtctcgatctcctgacctcgtgatccgcccacctcggcctcccaaagtgctgggattacaggcgtgagccaccgcgcccggctattcatgtattaatttcttactttaatgttctttagagtataatgtaaggtgtttcaaatttttggttaaatttatttcaaagtatagttatagttattgagatggaattgttttttaattcattctgagatagttgtcagtgaatagaaattctgacttttggatgttgcttttgtattctgcaagtttaataaatttgtttattctaataggttttagtaaagtcttaggcttttcttatgattatgcatagagataaaatattatataggaataatttaactttttcttctcaactggatgcttttgattgtattcttcaatatgtctttcttggacatttagtactatgtttagtaagactgaagaaatggcacattgttgacttgttttagatcttagagtaaaatcttacatttccttgtttagtatgtaattagctctgcattttttgttatatgtgacatttattggcttgaggtgcctttttcctatacctaaatttttcagagatttatcatgaggaaatgttgaattttgtcaagcttttattctgcatctatttaatgttaaaaatgtaaaatcacaatgaattctacataaattgaaaagttttcaaagactattatgaacatctctatgtatgcaaactaaaaaatttagagaaaactgataaagttttaactatacacaactttctaagattgaaccagtaagaaccagaagtcttaaccagagcaaaaatgtataaaatatataatgatattgaataagtaataaaaaagtatcaataataaaaagccttgtgtgatataaactcacagccagattttaccatatatacaatgatgagttggtactaagcctactaaatgtattccaaaatatcaagatgggattctgccctaacttgttatataaaatcagtatcgtcttgataccaaaatatagtgaagacataaaaaagaaaactacaagccagtatttttataaacattgaaacaaagttattcatgaaataatagtcaactgagtttataagtaaatccaaaagttattttgccacaatcatgtgagcttcattccatgtaaggatgttttttcacatgtaagtcattaagtgttcttcaccatgtaaagataagccaaaaattatatgattaacacaatagatgcagaaaaaacattcaagaaaatttaatattgattcatgaaaatattctcaacaaactaaacattgatgaaacatacctcaaaataataaaagccatccatcacaaatcttcagcacacatcatactgaacaagcaaaatctggatgtattctccataaaaataaacataagacaagaatttccactctaagtagttctattaaacataattctgaaagctctaggctgggcatggtggcctttgcctgtaatcccagcactttgggaggccaaggtgggcagatcacctgaggtcaggagttcaataccaggctggccaacgtggtgaaaccctgtctctattaaaaatacaaaaattagccgggtgtgttggtgcatgcctgtagtcccaggtattcgagactgagaaggggaaatgcttgaacctgggaggtggaggttgcagtgagcggacatcacccaactgcactccagtcggggtgacaaagcaagtaaaattcatagggaagaataagaaaacccaaatagccaaggcaactttagacattaaaaaaagagagaaagaaaccctgaaggcttcccattacctgactttaaactgtactacaagctactgtaacgagtgtaacatgattctggtacaaaaatacacatatagaccaatggaaaagagagagccctgaaataaagcaatacttttacaaccaacttattttttacaaagtcaacagaaatacaggagaaataactcctattcaataaatggtagtactgggaaaactagttagtcgtgcagaaaaaaagtagacccctgtctcttcccacataaaaaatataactcaagatggattaaagacttacctgtgagtcttcgagctacaaaaattctagaagaacacgtagaaagtactcatttagacactggcctctggtaaaaatttgtgaataacaccttaaaagtgagtgcaaataaaaatcaaaaggctgtgtatggtggcgcatgcttgtaatcctagtgctttgggaggccaaggcaggtggatcacctgaggtcaggagtttgagaccagcctggctcacacagtgaaatcctgtctctactaaaaatacaaaaaattagccaggcatggtggctcgtgcctgtaatcccagctactcaggaggctgaggcaggagaatcacttgaaccagggaggcagaggttgtggtgagctgagattgcaccactgcactccagcctgggcgacagagcaagactccgtctcaaaaaattaaaataaaaataaaaaatggcatctaattaaagaacttcggcacagcaaaagtaactaaacaaagtaagcagacaccctacgttatgaagtaaaatacttgcaaactgcatacaacaaaaaatatatagaatttattttaaaattaatttaaaaacagacaaatgatatgactagatacttctcaaaggaagacgtgtttccagtaaacatgccaaaaatgttcaacactcctaatcatcttagagatgtaaatcaaaacgaaaatgtgataccatttcacaccagttagaatagctgttattaaaagtcagaaaataacagatttgaagttgtggagaaatgtattatgaagaaaatttatcttcataaattgttggtgggaatgcaataaaatttagccactgtggaaagtagtttggagatttctcaaagaactataaatagaattgccatttgacccatcagccccattattcccaaaaagaataaattttctttgccaaaaagccacctgcactcacttgtttattctagcatgattcacaatagcaaagacatagaattaaaccaggtacctataaaccttagattggatgaggaaaatgaggtccttatataccatgcgatactatgcagccacagaaatgaagtaatgtcctttgcagcaacatgaatgcagcagatggccattaagcaaattaacacagatcagtaaaacaaataccacatgttctcacttacatgtggaaggtgaacattggatgcgtgtggaaacacagataaaatcaataaacactgggaattctaaaaagatggaagaagaaatggagacaagcattgacaaactactttccagtgtgttgtacactacttgggcgatgggattattaagtatccaaacctcaacaccatgcagtatacctatgctacaaatctgcacatgttctccctgaatctaaaatagaaataagatgttttgtggtataatgacatattatgtatctttagctccaagttaatggttggaattagcagtgtaagacagaagtatttacctcttaaggcataggggtaaatgtttttataccaggtctcctacatgttgtaagctatcctctctgaaagctcttggtctatagcccaagaagtgttttattcccaagtgtgcagctgaaataaatgactgtatccttttttaatgtattaactgtagacaagaatatatagttagttactctttttggggataagtggtatgtggtttaatcacttttatttttagaatgaatcatttttttttaatgtgaggttgtggaaaatcatgttaaattactgaataaggaaaatgaaacatttttcttaagcataaaagtcttatggccaaaccccaagaatgatgaaacagagagtgtggattaagaccacactgctgcaacaattctatcacaatcattctggtaaaaacaaaataatgggtcagaaggaatttttagaatacttttttgattctatcacagtgttaaatttttatttgtctttattatttgctatatagaagtctgtacttcagcaaaagatgccatgaatttctagttaatgtgctcacacatattctccctagaaaggtactgctgtgtttacaataaatgtggagcattgattatcttccttgtgctgctatgtttgtataaaaaaagacttcaagtctgactttgcaagtaaagcagagtcaaccctgacttttctagtttcaacagccacagcctctgaaatttagtataatgtcaactatgaataatgacagcatttcaaaactgagaaaaagaaattgataactttatatttttagtttatcatttagtttataaaaatttatagtttctaaattatatgttaaataacttgaacatgcagatacctaaaagattcatttagatgatagtattaatatttaatagcttataattgtgtatcacatttgctgctttgggcttcctggaaagcagttatttagtttctaaatgtaaatggagaaaaggctttctataatcctaatcatacagttcttttaagattagcactatgtttagatttgaataaaattcataggtttgtaagtaaggtaaatgttaatagtttttttctaaaaccaacattttaagtgactgatcagtaatttcaatctatttcattttattaactgagaagccaaattatttaagcaaaataagtattcttatattactctttctagaactttcagaaactaactcaatggatgataatgtacatagagaccacaaatattctatataataataggctcattcttgctctctttctttgcccaggctgttgtgcagtggcacaatctcggctcactgcaacctccgcctcctgggttcaggtgattctcctgcctcagcctcccaagtagctggaactacaggcgcatgccaccacacccagctagttttttttttttttgtatttttaataaggatggggtttcaccatgttgatcaggctgatcttgaactcctgacttcgtgatctgccccccttggcctcccaaagtgctgggattacaggcgttagccaccacgcccggcccattctagattttaatataaaaaatatatttcaaaagtaaaattggtgtctgctcttttaagccatgagaggaacaccattgttagaatctatttaccaaagtgcattaggcttagtaataagtgctttacgccaaaaatcaagttctacctactatctaagggtaaagagaagtagttttaaaattcctatgtatttctactaccctaaaaaattaaaagccaaaatgttaggaataaaaagcattgcatgaaatggtgttaagcataaagattaaaactgaaactcaatattaggtggtgctgtagcaggacaagctgtagacaaacccctctgacactgagttaaagaaggaagggctttattcgtctgggagctttggcaagactcacatctccaacaacagggctccctgagtgagcaattcgtgccccttttaagggcttacaactctaaggggatccgcatgagagggtcatgatcaattgagcaagcagggggtacatgactaggggctgcatgcactggtaatcagaacggaatagaacaggacagggattttcacaatgcttttccatacaatgtctggaatctatagctaacataactggttaggtcatgggtcaatctttaaccaggcccagggtgcggcgctgggctgtctgcctgtggatttcatttctgccttttagtttttacttcttctttctttggaggcagaaattgggcataaaacaatatgaggggtggtctcctcccttattccccccctttgagaatctcactcaatagtgggggttctcagttttattcttattacccatgtcttcttgcaagacagattgatagtgattcatatagtacacttgtgctgaagcattttgatgaactaaggtagtgataaagctttctatcatttgaagaagtacaggtagcaaacaaaggagcagtaagcaggtttccattactattataactcctattataacagttttaaatctttttagcactggcaaccactttccaaacatggccccaggattaaatccatgccacacttgcacaggcacatgtgccagttttgtcatatttctatgtcttcaactacttgcccttgatcatctatgtgaagacagcaattagtaaggttaaattttctactgaccccctccttcagctgctagcaagtagttgagagccaatctattttgatagatagcatttctcatcgagtttcttgccaggccagaatagtcaaggctttgctggtcttattagtgattatttttaagacagcttttaaccatatgatttggttgagcatgtaaatggaggtctggtatccccacgagccgtcttgtggccaagtagcaggcccataatattgtatgattctctcagggggccattcattatctttcctattttctatagctatgattctcttttcgcgggaagcatagacagggaagcccaggagttcacctgtctttatgggcagtaggaagaaagatggtttaatagtgccaataacacaactacctgcccactggtcaggtaatttggcataaggtctatgcccacatatccagtataatccagtgggtccagtcctggtgggactccgggtgggtctacacagtttgcaactttgggaatttactaaatggatttttcttaatatggtttgaactatattaggtggctgtttttgtagtactattatacagtttttgcccaaggcagctgagtcttcccacaggatgggtgaagtccttcccaactcttgctatacagtattgtctaatgattgaggcttttaggacccagaagttaccagggtgattcttttgagccaggaatttatcaggaactgggtctgtgggtactaattctcgggcttcccatggccattgatctcctgttatagttcctccacatacataacatgaagtgacattgagagactgggctacatgcttggctaattgcaaaaacaaatttcttgtttttcctggaatttctggtactggcacattcagttcgtcatagaaggtttgaaatactggctcaggagagcatttataaactcctcaaaccatgatatttatttgaggatccaattcagcttcgtcgatttctagggttacacattccccttttttccagtgaggattaagggggttggttattactagttctaaggggttacagtgaccactggtagaggaagggcactttatcctttctgaagctggacaggattcttttcattttttatccaagtagcctaaatgacacaagatcagtatccacattcatttccacacagtcctaattcatggcaaatgtacttattttctgccatatagcctcttctttaaattaagagaaccatatcctcttcctaacataactattagtgacagcacaggcatcatatttcaaggtgacttgtttgggcacccctttttcttctgttttggctaacactttacttgtatcgtttatgagcccccaccagtcctcagtccttaatcttattttaaaaactgtggtcggctgggtgcagtggctcacacttgtaatcccagcactttgagaggccaaggagggcggatcacaaggtcaggagatctagaccatcctgctaacagggtaaaaccccatttctactaaaaatacgaaataattagccgggcgtggtggtgggtgcctgtagtcccagctactcgggaggctgaggcaggagaatggtgtgaacccaggaggtggagcttgcagagagccgagatcatgccactgcactccagcctgggcagcagagcgagactccatctcaaaaacaaaaacaaaaacaaaacaaacaaaaaacaaaaaaactggtcatggaagtctcagatgggtcataacacacatcaggttagtcatttcctgggctacataccttgtatagaataacattatacaaataagttctttttagagttccagtacacttataataaccacaaaataataggaccgtagcaatcttttgtcctacctcagtgacttgaagtatacactgggaacagtcctcagtatgaggaaggtcagttgaagtccttactgtaaaagtccaaattttaaggaaaatgagtcctacaatgagttttctcatgcttcggccatgcgtggaccagtcagcttccaggtgtgactggagcaggtcttgtcgtcttcttcagagtcactttgcaggggttggagaagctgctcccgtccacgtacagctcccagtcaactaatgttcaaggatagtctcagaggttgggcctgctagaataaactgagtccaacacctctacacagttatgttcaactgcactctctgataccgggagcaaggtggcggggtttagggtgttgcaaacttcaatggttatgcgggaattttcacagagcaagctttggtacttggttaatctaacatttgttaaccaatgatgtcctttggcagtcattaaagttaccacagcttgggggggcctttatatttaggttttgcccaagggttagttaatctgcttcttgtgctaacagggccgttgctgccagagcccttagacatggggaccagcctttggaaaccccatctagttgttttgagagataggccactggccttggccagggccccacagtctgggttaaaactccaactgccatttttttctctttctgacacataaggtataaagggttttgtcatgtcaggttgccccagggctggggccaacatgagtttttcttttaactcatgaaaagcttgttgctattggctgtaatagatgtagtttattcaatctacatttttattaactgccacccaccaaaatattgactcatatgctgcagctatttgtttttaagctttaaattgatctgatattccccgtgggactccaattgcatttaatgaacgtgagagtcgatagatccataaggggcttctctcgctttacaatgtcttatttttcctccttctggttgatgaaatgccagggtgaaagggatagccaactggactaaagtataagtgccactccagttattcggcagaatgcccggtaaaggtctaccacaataccaccacacatccactcagggatgaacaagggctgactgattgataagctcttgaaaattcttaagctcactgcatctcttcgggtctccaaggaatgctaagtttcctccctgtcatgagagacacaaagtgaacttaatgttgggagacagaagctggatggcccttgggtgtgacccgaagggtactggacttcaggatatagcagagagagagcttggcatgacttgttacttcaggctgtagaatcctggaaaacagctacaatggagcccacgcctagtcgactggaggaccaccctagtggaaaggggacaatctgggcctctggcctgccatgcacacaagcataacaattgcttttgtttaacgtgcggatggaatatttgatctattccaaccagacatttgcatcttggtatcctgtcttaattgccaaagtttgttttaagtctttaaaacaagatgatcctctggtaaaatgatcctctataaggaacatagtaaaatgaatctatgattttaggaagttataaaaatcagttagggcagtccatccttgctctttagtggtccaaagaacgttggaccaactatggcataaaagttctacattggagggcaagactcctggttgacaatggagtctttatcaaaatttccccagattaaattgtcctaatttactaatgcccagactgaggagagtcaggagggacagaggtacttttctgaagtacagacctgtctttgacttggcaagtccccacagggtataacaaggtaaacattaaatgcaatagtttgaggcaaaattgacttggttatgttaataactagatggtcagcaatagagtgaggaaagaagaaagagtaatagaacagatgaaagagttaaatttttctaagctttagtttggtagggtattcccctgggactatggcccatgactctggagggggtggtgctttcttgacttgggtgtgatgagtccatcatttttacactgtatgaacagcagtcttggtggttagcaacacaaggtagggtccttcctaggctggctcgagtttccttttttttttttttttcaccttttgatgagaatgtgatcttcaggctggtgctagtttaccagaaattctaggggtggtacatgtgctaaaagagttttagttttgagggaaagtggaagataaatcaagtatataatttttaagaaattgaccttttgttttaaatgtggggacatcagcagtggactttatagtccttggtgcctttctactgagaaatttcctttagcacccatttttttaattagtttttagaccaaagaagccaaacaccattttatatttgacaatgcttcctgcatgatttttataccagataagctaaatgtcacctttatattagtgtgccattaatgttaaacttagttttaataaaactttgtagacatatttattcaatttttaatgtcagaccataaagtaagatttttatagactctttttaaccttttataatttttgttgaagagtaggttagtgctttaagaaaaactcattgtgtttatactttaatttcctgttcacagaaaaactggatgacacccctttaactttagctgatgtttacacacagaattttctttacaattaacgtttcaaaacttgcttaaaccttcaaaacaaattttaaccttttaatgtaggtaaaaatccacattcttatgcctccttataatccttttaccaaaggtatattttacctttcttatggaccttgcacataaactgtttcttcaatagtactcaggaggccttattatttttaaattatacaacatttcttgcataattttttttttttttttggtatatattgatcattcttgggtgtttctcggagagggggatttggcagggtcataggacaatagtggagggaaggtcagcagataaacatgtgaacaaaggtctctggttttcctaggcagagggccctgccaccttccgccttccacagtgtttgtgtccctgggtagttgagattagggagtggtgatgactcgtttaaccagtatgctgccttcaagcatctgtttaacaaagcacaacttgcatcgcccttaatccatttaacccttagtggacacagcgcatgtttcagagagcagggggttgggggtaaggttatagatttttcctagtacagaacaaaatggagtctcccacgtctgcctccctctacacagacacaacaacaatccgatctctccctcttttccccacacttcccccttctccattcaaccaaaccgccattgtcatcatggcccttctcaatgagctgttgggcacacctcccagatggggtggcggccaggcagaggggccccccacctcccggggcagccgggcagaggggctcctcacttcccagatggggctgccgggcagaggggccccccacctcccagacggggtggcggccgggcagaggggctccccacttcccagaccgggcggctgggcacaggcgccccccacctcctgggtggggtggctggccgggcggggactgccccccacctcccggacggggcggctgccggtcggagtcactcctcacttcccagacggggcagctgctggtcggaggggctcctcacttctcagaaggggcggccggtcagaaacgctcctcaccttcaagatggggtggcggcagggcagagacactcctcagttcccagacagggtcatggccgggcagaggctctcttcacatctcagacggggcggcggggcagaggcgctccccacatcccagatgatgggtggccaggcagagacactcctcacttcctagacggggtggtggccgggaagaggcactcctcacttcctaaacggggtggtggccgggaagaagcgctcctcacttcccggattgggcggccaggcagaggggctcctcacatcccagaccatgggcggccaggcagagacgctcctcacttcctatacagggtggcggccgggcagaggctgcaatctcagcactttgggaggccaagccaggcagctgggaggtgtaggttgtagcgatctgagatcacgccactgcactccagcctgggcaccattcagcactgagtcagcgagactccgtctgcaatcccggcacctcgggaggccgaggctggcagaccactcgcagccaggagctggagaccagcccggtcaacacggcgaaaccccgtctccaccaaaaaatatgaagaccagtcaggtgtggcagtgcgcgcctgcaatcccaggcactcggcaggctgaggcaggagaatcaggcagggaggctgcagtgagccaagatggcggcagtacagtccagcctcggcttggcatcagagggagaccgtgcaaaggggagatgaggaccatgaaaaagggagagggagagggagaaggagagggagagggagagtgcataaattttttttaacatttttctctttcacaacttttgcagacaattctttgacatgcctcaactttctgacttattacaaatatttctttctttaaacaaccagttaatttatttcaggacaataatttaccatataacattctttttacagaaattctgccccccacttttttttttcgaagatgataaccattcttttccaaagcgaacttcttttatgtctgtggactagaccatctaaggccacaagattagaagttactataatacatgttacactgttaacttttagcaaattttacttttgttgaaaaccttgtaagtttgggatttcaattatcctttgctatcaataagaccttgtttagtccaaatgaacttagaattggtatagataggtttttttttttttaattaccttggaggaatcatctatcgtcctgtcatgaagggagttcctcctaggtctggtcggaattttgtatggtaattaagatttagatcccctgttagggaacctgctgggttaagggaattttcagtggttaatgttaaatcatctttttttctttttttaggatacttctgaactggtgagatgtgctcaaaatgaggtttcctctaaaagttatttttctactttcttctgttagcaaagcagttgccactacagattgaatgcatttgggccatccacagattactaggttaaggatttttgataggaaggctacacaggttgtcagtggcctcagtgctttcaggctatgcccttgtttacactgacaacaaagtgatattggagtgttgtagggttatggagaatacctttaattatcaattataggttttaaatttaccttggcttttaaaggaatagggtacactgtttgtttttcttaacaacttgtatatctttctttctttctgtctttgattttctgtctctttttctctttgactttccttttgcctctgtctctttctctctctctgtctctctctttctctctctctctctttccttgactccctctttgtctctctgtctcttcctctttctctctcctggtctttccctgcctctgccagctgcttatgctgctgttctctcaaccactgtgggggtagggtgggggtctaaaaccagccgtgagcaagtgtctatgtacggcaactggtctgggtgccctggcttacaggttaccttgtgccatacctttgaaacaagggacctgtccaggcttccttctgatggccaacccacttctaatgctgaccagtctatttcacacaaagttctaagttttcctgctctcatagtaacactctaatctcccttaaatcctttctttaaatttttcaacatagttcctagtggggtgggcttactttgtgcctgacccatgcttttttgagacaaaacaccacgctcacaccacacacacaccacaaaacaaagaatgtgtaaaaagggcacacatacacttttacagtttacacaaaaccagaatcaaaaccaaaatcagagtatccagaaatccaagccaggtcgaaaccaaaaccaaagtatcaagcaatccaagtcaactcaaaaacaaaaaccaaagtgctggtacaggcacactgtgggtgatcagaccacacttccactcaaatggagtgggcaagttccaaaaactagtcttaccaagtttcaggtgtccagactccaagtgccagttccttcccggtgttcagccactgcgctgatcctccacaggggcatgccacacactgctctggtgaggcgttccactggagtaattgcctacctgggagtgctctcaggatccgcgtcgctcaagctggctgcagtctccaacagggatgctccacagggcaggcctaagccacctaaagggctgcctcgaccatctgttaatcactttgcttcctggttggggaaccaagaaatgtagcaggatgagccacagacaaaacccctcagacactgagttgaagaaggaagggctttattcagccaggagctttggcaagactcaagtctccaacaaccgagctccccaagtgagcaattcctgtcccttttaaggtcttacaactctaagggggtctgcgtgagagggtcatgatccattgagcaagcagggggtacatgactgggggctgcatccactggtaatcagaatggaacagaacaggacagggattttcacaatgcttttccatacaatgtctggaatctatagataacataaccggttaggtcaggggtcaacctttaaccaggcccactggcgccgggctgtctgcctgtagatttcatttctgccttttagtttttacttcttctttctttggaggcagaaattgggcataagacattatgaggggtggtctcctcccttggtgcctgattgtatctcagttctcccacttatgggctgtatgacctaagtatagtttcttgcctgtctgtgcttggccctatagtggttctgtgagaataatagtgcctacatcctaacgttttgtttaaattaaagcaattaatgcaaataaaggtgtcagaaaaatgcccagcacataacaagtgtacaggaagtttattagctcttatttgttgattctgttagatcatgacaaatgttaagcctgaaaacaagatggccataccactggtttgtaacccatgttccttctaatttgtccgtctggggctataatagtagttgaatgtttttaatactaaccttggcaaattcccatatattcacatacagcatggatataaatatctttaaaagatttatcattgagtactgctctttagcactccagtaaatggataaagaggaacttaaatggtgagtgtttgtcagttttattcattagagaatgaggcaaattgtttctttatctacttgtttaatatatttcttatttattttcatttgatacatttaaatgtagtttgaaaatatatatttaaataacttttttctctaacaaatgaagaaaatcatttatttataaatttagacagaattttactctaaactgttgctttagattttttttaaggtattagatcattaaaaatcagcatactttatttctgagtgtgggttcagactattcatgatattaaaagtttacttacatcactacatgagcaagccacatgaaataaaaaaatatgtatatgtctcctgaaattttaaaatgaacaaacactttattctctggcccaatttcttaaaatttctctctttttttttttttttttgagacatagtcttgctctgtcacccaggctggagtgcagtggcatgacctcagctcactgcaacctccacctcccagattcaagcaattctccctgcctcagcctcctgagtagctgggattacaggcgcccactaccacttccagctaatttttgtatttttagtagagatagggtttcaccatgttggctaggctggtcttgaactcctgacctcaggtgatctgcccactttggcctcccaaactgctgggattacagatatgagccaccgcacccagcctctctctcttttttttttttttgagatggaatttcactctatcacccaggctgaagtgcaatggcacaatctcagttcactgcaacctctgtctcctggattcaagtgattgtcctgactcagcctcccaagcagctgggattataggcacctgccaccacactaggctaatttttgcatttttagaagagatggggttttgccatgttggccaggctggtctccaactcctgacctcaggtaatccacctgccttgggctcccaaagtgctgggattataaacgtgagccaccacacccagccttctcttatatattttttatagtattaatagtatttttgattggcaaataagagttgtataaatttatgggttaaaatgtggttttaatatatgcatattatataatatgattaagtcaagttttataacatatctgtcaactcacttatcaatcatttcttatgatacatttgaaatttactcagttttttaaaaatatagtactttatagtttactatcatcatgctgctgtgcaatagatctcaaaacctacttaccctgtctttttgaaattttgtaccctttgatcaacaacttcctatttacttcccaccacacctaacctctcataaccattatttcattttctacttttttgagttaaactttattagattctacatataaataagatcatgcagtatttgtctttttgtgtcaggcttatttcatctagcatgatgtcttcaaaatttatctatattgttttaaatgatgggatttatccattgttatggttgactagtgttccatcgtgtatctataccaaaattttaaaaaataatttaaatatatgtatattagttaataactaatattaatttgttatttacataaatatatatttatctcttggttgaaaaactagtgtgttatgagaaaatatttctttgttaaagcatgtatcattgtaatttagcatataaatattttgttaataatagctcatttgtaccaagcactaaccataacactatatgtgttaataaatttaattctgacagtaatttaataacataagtatactaattatcattatttcacagtggaagaaagagagccactgagagaaatgactcactcacaatagcagagcccatattaaaatacaggcaactttgtcttaaagataactcttgagtacaaccataaaaatctttcaaacagataagacaaaattacttttaacaattatttttcagaaaaactaacataaattgaataattggataaattgtcattgttatacgtgtgtgtaaatgtataaaatggtacataaaatagaaataatttaagctagaaaaaagatgttaataattattatgaataaaatggtgaggtagtcaattattatttgtagatgatatctttgtttacttagataacaaaaaaactacaagactactttaaatgtctattcaggtgggtaggcaaaattttaagacgatcacctggattttcagtctgttgcacacctgctgtgtaatcttcacctctgaagtgtaaaaaacaagtgtctcactgtggtggaaaattacttatgaaattaggttactaatgtgttgactctgtgttcatcaaaagggagattaccctgattgggctaaacttaatgagaggtacttttaagagaaaaagacacatcatagaaaaatacccctgctgacctggaagtaagtgacttctaggtcaaccaatttgtaaactgcttatggtgaccccatggcaggaaatctatttgtatattgtcagaattcctgccttccacatgatgcttccagtaggaagagaaaaaggataccatgacaagttaaaaaaaaaaagggagggggctctcttttttcaagaaataatcacctctcatctgggatagcttaatataaacagaggagaccacaacatgagcacatcgatgagaggaaaaaggcaacctggttgaaagggctcactgacatgatggagcagcatttactaagtcacagtgaatgattagcctctgggatagcaatagtccgccaagaagtctacactcattcttatactgattaaatgagcatatccgtgccattctggaggcccagttttacactacatattacagaaataacatagagaccagtgggtaacctcctagaattaaacttcttgtgaaaaagcatatcttattgttttcacaattgaaaaaccttgaaaacataatgaatttatataataaatgtagtaatacagatgtttattgttgcgggaagtcagggacgccaaatggagggaccggctgaagccatgacagaagaacgtggattgtgaagattttatggacatttattagttccccaaattaatacttttgtaatttcttatgcctgtctttactgcaatctctaaacataaattgtaaagatttcatggacacttatcacttccccaatcaatacccttgtgatttcctatgcctgtctttactttaatctcttaatcctgtcagccgagaaggatgtatatagtctcaggaccctgtaataattgcgttaactacacaaattgtacagcatgtgtgtttgaggaatatgaaatgtgggcaccctgaaaaaagaacaggataacagcaattattcagggaataagagagataaccttaaactctgacgccggtgagccgggcagaacagagccatatttctcttctttcaaaagcaaatgggagaaatattgctgaattctttttctcagcatggaacgtccctgagaaagagaatgcacacccaggggtaggtctctgaactgggccccccagggcgaacctgtctcttatggtcgagattgcaggggtgaaataaactccagtctcccttagcgctcccaggcttattaggaagaggaaattcccacctaataaattttggtcaggccggttgatctcaaaaccttgcctcctgagaagatgttgtcaatgacaatggtgcccaaagcttcattagcaattttaatttcgcctcggtcctgtggtcctgtgatctcgccctgcctccacttgccttgtgttctattaccctgttaagtacttgatgtctgtcacccacacctatttcgcacactccctccccttttgaaaatccctaataaaaacttgctggctttgtggcttgtggggcatcagggatcctaccaacgtatgatgtctcccccggacacccagctttaatatttctctcttttgtactctgtccctttatttctcaagccggccgatgcttaggaaaatagaaaagaacctacgtgattattggggcaggtctcccgatagtttataataataaactgctaattttagaagattctactatattgtcatacaatattgaactttaaacaccttaatatgaatatgtcttgaatgcatgaacagctatgcaggtagtttctcttagattaacatgataaaagtaacaattagagaaaacatttagaatgggataaaatttatcaaaaccacattttttcaatggcttggcataattgtcatgcttttggaaatggctagattactaacaagaagcaaagacaaaatcatggctttgccaaatgattaaattcttgaccatttaaaatctaaaatcttgttatgccagtatagttatttgcataagtgcaataagaatctgttttgttttgcttttttgagatggaatctcactctgtcacccaggctggagtgcagtggcatgatcttggctcactgcaacctccgcctcctgggttcaagtgattctcctgcctcagcctccaaagtagctgggattacaggtgcctgccaccatgcctggctttttttattatttttagtgcagatggggtttcaccatcttggccaggctgttctcaaactcctgacctcataatccacaagcctcagcctcccaaagtgctgggattacaggcatgagccaccacacctggcctaagaatctgttttcttttgtgacattacacaactggaaaacttggttattttaccaaggctttaactggaatgttgtgctttcttttaaggaatcaaacttgacttaggaaaccaataaatcccttggaaactggcctcatattttgtgtacacagtcccagtgcagggtttctgatctgtggtaagtaaagaatgtcactttctagcaggctgggaagtccaagttatcttggaacctcaagaagagagaaattcactcaactcataagtatttgatggtacaaatccgtggctaggcttggctgtaaaaaggtcttatctcagattccttctacaaaacaaagttccatcaaagccaatttagaagacctatgtaacaaataattattcttgctgcaccgtatgcaaataattaagataactataataaagcaaacccatcctaccatgattagtcttctaataaaaatgggaaactggagagagaaaattgtttcaaaaactacagcatgcctgttgttatattctagtcttgcctaacgttttttatttttattattttatttattttatttttattattttctaccgtttaaattaaattctaatttttctgactacaatttccaaaataagctgtgttttcttaaagccctatgaatggaaaactaaatgtttcagcaggcgctgcctctgagcccccatatcatcacaggaggaaatctcttcactgttagtactgacaactaataactgagtgtgcccagaatccttctccaccacatctagtgagtccatggaacccagggtaattcagagagtatctgttataggaatcaactcctggatacatcacacataagtcaaagcctggaaagatgaggaagcaacccctgatagcccaaaggaatgtcctaaatatcaatataaagaaataggaaatcttaagctgaaaatagtaaaaaataagtaactgagtgagaactactcatcttactcagtctcacccctaccttaccaaatactttttgtcattcctacctcaaatattaatgaggcagaaatttaaaaataataataagaataagtactgcatttattcactactagaaaagtaaaagctaagtctcagaatgtggcaaggcaagggttaaaaggaaaaagaaaagaacaaattttcctctgcctagcaagctcacttcaaggacagttgtaagttaatgctgtctgaatagccaaggccaaaggaatgggctccagacacccccccatgcccttccagagcaaggttgaaggaagaaaaagaaagacggattcttttactgttactcttttcccaggcttcttaagcattattatgttttacaaatgtctatatttagccaggtcttgtttttctttcaatgcagctacaaggccaccagctatgcaaggtcacaagttatgttatgctataggttacatgacctgtcactgtatgactaactgcttttgttttgcttctgtaaggccacttataaaaaccccactctgtctttgttcaatgctcagctttttggatgtgagtccactgagccagtgcgtacctaaaataaacaacaatcctcctgtactccatattggtctctctgttcctcagtttaccacaacaataaaactttttaattaaaattattattattatttttttgagacggagtttcattcttgttgcccaggctggagtgcaatagcatgatctcagcttatcacaacctccacctaccgggttccagcgattctcctgcctcagcctcctgagtaactgggattataggtgtgggccacccacccggctgattttgtatttttaatagagacggagtttctccatgttggtcaggctggtctcgaactcccgacctcaggtgagccacccacctcagcctcccaaagtgctgggattacagacatgagtcattgcacctggccatgaaaattatttactatgccaccttgtgggaattgctttacttactctactatttgcagtaggactatatgctgtagcgccttgagggtggaatattggacagagaatatcaattactgtagcattttgcttagttattatcctcacggcaggaataatggttaccaataaaaaataacacatgggccttaccaaacatgcacctctgcctctcattaggtatgcaatgttgtttctatctcaactaatctggcctagtaagagacactgctgaaaacttaaaggactaaaaagctaaggtaataccaaaacaaccaaatagattcttggtttggaaacaaaatcatagcatgggtcatcccattcctgggccctctcctaataatatgcctaggactaatgttcttatcctgcctagttaaaatttttcaaagatttgtaactgacaggatcatggccatttcacagacaattaccccaaaacatctacagatggcattactcctgcagtctatctgagacctgaaaactcttggtccccttgtcagcaagaagtagccagaaagaacatgccacccctcatcctttttataactacagggtctggattaatagagcaggagcttcaccatcttggacaagtactgccatttttcacctcaatcaataactgcctaaatccaaagggcatcagtctaatgactaaggtcagcatgaccataaaccacaaataacatctctgaccagatactctccaaacccctctataaccagaaacaagccagccctgagataacctcccccctggctggagagatgtcagccccaaaataacctcccctctgaccagagacattctaaccccgccataaacttctcccccacacagaaacatttcaaacctgtgataagctgtctcaccttgaacgcttaaataatcttagtctgtaagagaaagtgctcctgaacaaaaccagccagaagcccctctcagacctgtctttgactgttgagctgcttttcatgtttctttcctctttctttaactcttacagtgactaatataaattattaaaataggttaggaacatttttttggctctccctctccctctccctctccttctcccgacggtctccctctccctctctttccacggtctccctctgatgccaagctgaagctggactgtactgctgccatctcggctcactgcaacctccctgcctgattctcctgcctcagcctgccgagtgcctgcgattgcaggcgcgtgccgccacgcctgactggttttcgtattttttggtggagacggggtttcgtgtgttggccgggctggtttcctgctcctaaccacgagtgatctgccagcctcggcctcctgaggtgccgggattgcagacggagtcttgttcactcagtgctcaatggtgcccaggctagagtgcagtggcgtgatctcggctggctacaacctccacctcccagccgcctgccttggcctcccaaagtgccgagattgcagcctctgcctggccgccaccccgtctgggaagtgaggagcgtctctgcctggccgcccatggtctgggatgtgaggagcccctctgcctggctgcccagtctggaaagtgaggagcacctcttcccggctgccatcccatctaggaagtgaggagcgtctctgcccggctgcccatcgtctgagatgtggggagcgcctctgccctgccgccccgtctgggatgtgaggagcatctctgcccggctgccctgtgtgagaagtgaggagaccctctgcctggcaaccgccctgtctgagaagtgaggagcccctccgcccagcagctgccccgtctgagaagtgaggagcccctccacccggcagccaccccgtctgggaagtgaggagcgtctccacccggcagccaccccgtccgggagggaggtgggggggtcagccccccgcccggccagccgccccatctgggaggtgaggggcgcctctgcccggccgcccctactgggaagtggggagcccctctgcccggccaccaccccatctgggaggtgtacccaacagctcattgagaacgggccatgatgacaatggcggttttgtggaatagaaaggcgggaaaggtggggaaaagattgagaaatcggatggttgccgtgtctgtgtagaaagaggtagacatgggagacttttcattttgttctgtactaagaaaaattcttctgccttgggatgctgttgatctatgaccttacccccaaccctgtgctctctgaaacatgtgctgtgtccactcagggttaaatggattaagggcggtgcaagatgtgctttgttaaacagatgcttgaaggcagcatgctcgttaagagtcatcaccactccctaatctcaagtacccagggacacaaacactgcggaaggccgcagggtcctctgcctaggaaaaccagagacctttgttcacttgtttatctgctgactttccctccactattgtcctgtgaccctgccaaatccccctctgtgagaaacacccaagaatgatcaataaaaagaaaaaaaagaaaaaaagaactttccaactataaaaaataaataaataaataaataaaaaataaaaaaaagaactttttttgtacaacatataatcctgagaagacaatcaaaactttatgtacattttggctacctgaagggccatctaaacatttatacagaaacatttatttaactgtcactgtgttttttgtttcttgtttgagatggagtctcactttgtcacccaggctagagtgcagtggtgcaatctcagctcactgcaacctctgcatctccagttcaagtgattctcctgtctcagcttcctgagtagctgagattactagtgcatgctaccattcccagctagtttttgtatttttagtagagacagagtttcaccatctttgccaggctggtctcgactcaagttctgccaggccaaactccacccacctcagcctcccaaaatgctgggattacaggcgtgagccaccatgcctggccaattgttacttttaatgcatgtcttctgttagtataaaagctttctcatgcaagaagtttgatgttacaacaatagctaaaagaatattagaaaatatgttttcctcatggaacatttctgaaaaagtctcataggataaagatactcatttcactagacaagtcgtaaaactgttaaataaggcattaaagatacaatattattgagcaaaactaaattgactggattgcctttgtagttgcagattgatgacaatcagatctattaagagtggaaaaaatgtgttgacccttctaaaatagttactggaaagcctatgcatgtaataatagaacctcatgtatcttctgctactgaagtctattattactaaatgcagcaagtccttaatccattatgacaaagcatattttcacaaggtaaataaagctttgcttttttttttacagtctcactctggcacccagggtgcagtggcatgatctcgactaactgcatcttccacctcccaggttcagtgattctcattcctcagcctccagagtagctgggattacatacatgcaccaccactcctgtctattttttgtatttttagtagagacagggtttctccatgttggccaggctaggctggtttcaaactcctggcctccagggatccacccaccttggccaccaaaagtgcagggattatagtcatgagccactacacctggccactacttactcagggtagtaaaaccttttataatctaaaatcaagacattgagtctgcttgccatctacactgcagcaagacttggacccttgaaatttgggtttataatgtcacaactcagaagaacccctctaaactcttgcgattgtataccctttggagatcttaagggaaagctaaccagagaagtttatctttaaaaacaaatggcaactttgatatagatagctttttttacaagatcaaaaatgaagacatgtctgctattatgacactcttagttgacaaatttttttctcatggctccacaaacaacagaaatcaaaaagaaatctctcatgtgcactcatgggggtattcttttatatgtagagaattttgcagccagctttacatatgaggtttcttacccacattaagaaagaaattttaatgagacatttgctgcctcataatatcagaaacaaaatattggtctactgctcttaacctacttcataacttaaagggaacttcttcagaataggttaaagagcattgccaagggccattcgacttctgaatgggcattgtttgttaggttctccccacaccccgcatggagtagagtaaatgaggcaatgattagaaatgtattttccataataggctctataacagattttactgcaaaggctatggttatacaatagactttaaattttcttactaaagttttgctaaataatagaatttctctaaattactgaataaacagaaaagtatctgtgcagttgctaatatttgtagttgcacatggagaaatacattaggtactacatagattaaattgcaggggattaataaagaggctgctttgtttaaatgaatagaacatttatctaactaattatttgatctatttaattttagttggtttgttcatggggaccctggctaaaaacatacttcaaactcttggtgttatcctctttatagtaaaaatggtagtttctctgccacactctattctctcaaaagttataaatgtttgaatgcagtcatctgtacaatatcagatggtctatgtttaactggaatgaaaaaacctcaaaggcacatacgaccatgaggacaccataacctatgaatgacatggtataaaaaaaaaaaaaaactcaaaataatgaaaactgagagtggcactacggccctgaattttggtcacactcttacctacatgagaacttaaccaaaatgggaggaggggatatctaaaataaaattactggaggccttcattctgaactaagcttgtgcactaggcacagagcaaaccaaaatggagtcacttatgctaaatgtgatgtaatcaaacttaaaatttaagaaaatagattctaaaacaggccaagttttgttttctgtaaacagcagatgtaaacacaaggaggtcccctctattgtaattatttaaaaaaataataacctgaagtcgttgtttccacttaaaaaacccacagttctggtatttcacagtggaatttgagactaaataagtacatttttgatggtgacagagaaatatcaatgtctaaagtttggatctgtttctcaaaattgagaaaataactaaaaaagagaaaatgttaattatagcctaatgctgccccctttcatgtttaattttggtcaataggtcattttgtacacagtatactaaaaccacaccgtatatgtaagtagactgtaacccattcttgtacctgtcaggcctctgagcccaagctaagccatcataacccctgtgacctgcacgtatacatccagatgtcctggagtaactgaagaaccacaaaagatgacattccaccattgtgatttgtgcctgttccaccccaactaatcaactgaccttgtgacattctcccctggacaatgagtctcatgatctcccaaccctgcaccctgtgacccccgcccctgctcacaagatataaccacctttaactgtaattttccactacctacccaaatcctataaaactgccccacgcctatctccctttgctgactctctttttggactcagcccacttgtacccaagtgaaataaacagccttgttgctcacacaaagcctgttggtggactctgttcacacgaactcatgtgacatttggtgttgaagacctgggacagggggactcctttgggagactggtcccctgtcctcaccctcactccatgaggagttccacctattacctcaagtcctcagaccaacccagggaacatctcaccaattttaaatcgggtaagcggcctctttttattctcttctccaacctctctcactatccctccacccttcaacccctcccttccttaatttcggttcctttccctttctggtagagacagaggagacatgttttatctgcgaactcaaaacactggcgcccgtcatggagtcggaaagatagtcttcccttggtgtctaattactgagggggcgcttgcctgattattcacccacattccagaggtgtctgatcacctcagggactcctgccttgatccttcaccttggtggcaagtaccacctcccttacaatttgacttcctcttttcctaattgaatacactttatttccttctcctgcctaattgccctggccagaacttccaacactatgttgaataagagtggtgagacagggcatccctgtcttgtgccagttttcaaagggaatgcttccggtttttgcccattcagtatgatattggctgtgggtttgtcataaatagctcttattactttgagatacatcccatcaatacctaatttattgagagtttttagcatgaagggctgttgaattttgtcaaaggccttttctgcatctattgagataatcatgtggtttttgtctttggttctgcttatatgctggattacgtttattgatttgcatatgttgaaccagccttgcatcccagggatgaagcccacttgatcatggtggataagctttttgatgtgctgctggattgggtttgccagtattttattgaggatttttgcatcgatgttcatcagggatattggtctaaaattgtctttttttgttgtgcttctgtcaggctttggtatcaggatgatgccggcctcataaaatgagttagggaggattccctctttttctattgatgggaatagtttcagaaggaatggtaccagcaactccttgtacctcaggtagaattcagctgtgaatccatctagtcctggactttttttggttggtaagctattaattattgcctcaatttcagagcctgttattggtctattcagggattcaacttcttcctcgtttagtcttgggagggtgtatgtgtccaggaatttatccatttcttctagattttttagtttatttacatacaggtgtttatagtattctctgatggtagtttgtatttctgtgggatgggtggtgttatcccctttgtcattttttattgtgtctatttgattcttctctcttttcttctttattagtcttgctagggacaacattcttttatgcagtccttttcagttatccccaccttcccagttgccttatgaggttgagacgttttaacaaaattatctgctacactgactattcctgtactgcagcccatctcattgctgctcttctccccaactcaaagcctccttcatgtcttcctcttgtatcacccccaccttaacccacaagtgtgggacacctctactccctctctggcaacaaatcacacacccattactatcccattaaaacctaatcacacttaccccactcaatgccagtatcccatcccacaacagactttgaagggactaaagcctgtccagaatcttcaccttatcaacaaaattgtctttcctatccacctggtggtgccaaacccatatactctcctatcctcaatacctccctccacaacccattattctgttctggatctcaaagatgctttctttattactcctttacacccttcatcccagcctcttttcactttcacttggactggccctgacacccatcggtctcagcaacttacctgggctgtaccgctgcaaggcttcaggcacagcccccattacttcagtcaagcctttcttcatgatttactttctttccatccatctgcttctcaccttattcaatattttgatgaccttctactttatagcccctcctgcgaatggtctcaacaagacaccctcctgctccttcaacatttattctccaagggatattgggtattcccctccaaagctcaaatttcttctccatctgttacctacctcagcataattcttcatgagaacacgtgtgctctccctgccaattgtgtccagctgatctctcaaaccccagccccttctacaaagcaacaactcctttccttcctgggcatagttgtatactttcacctttggatacctggttttgccatcctaacaaagctgttgtacctgagcgagttagagaaaatgtcacactttgagatgaattaagagtccatttatttagccagcggccaacagatggctaatgctcaaaattctctcagccctgaagaaggggctagattttcttttatactttggtttagaaaggggagggggctctagttaaaacaattttacagaaataaagtaggcaaaaagttaaaaggataaatggttacaggaaagtaagcagttccaggtgcaggggctttaagactattacaaggtgatagacccagggctttgggcgttatcaatgggacgaattcctgggaattgtggatatagcttgccacagtatcttatcagttaattgcattcttggatgtgctgggagtcagcttgcacaagttaagtccttgaggaagggggtgccagtgaaagagccaagatggagtatgtctggctctcttagcaaagggagagtcaattcaggtggaaaaaggctaggtgattaaaggaaaagggagagtctaaaaacagtgttagtaaaaacaaggttgggcattacattcctcacttgtgtttttggggaatcaaatcgttgattcctcagttatagcaagggggttatactgagtcttaagatacataagtttgacagaagctatgcattgttttacaaaatgaagaaactaatttaatatgcaaggcccaaaaattagacttaataataggatggggaggggtccggctaacttagtgattagagtagttatccctgggttctagttgaacatgctttgatactaggggatgttattttctcatttttgttggtgcctatctagattttctcacaccttttggagtgtatcttttatgactaagaatggtggaggaacagttaaatcaactttgtcagggtgtttctggaacataaggttacttagatcagttaaaggcctaattgacttaggtgggctctatgagactaaaattttcttttggatggtgaacatagttctaacatcgaatcctgggatataaagtcttaatctttatgacatgccataatactattgaactgaattagggtcatgaactgttatagtaagaggattacaatttttttagtacatgatttaggacaagaagctttagttatggaatgaagatctggttgatcctctagagtaggtggctaaagttacacatgtctaatcagggcagaaaaactgataagtatattgacagctagcgtcagggtgatttctaggacagaggtaaaagtcaacattttggagtctttttttctgcacttttggagcttctacatctagtttggctcttggagcgcttaaatcttgctgcaaggtcaacacttcctgctcctgggactggcagattgtgttgctcttcatgggtaccggctggctctgggaagagtacacataaatcaactgcaaaggagacttctttggaggtaccagccttctaagtggtgtttgcaaatacacgtcctgttgtgaaagaggtgaggagaaaggagtaggaagatacagaggatttaaagggcaaaaacaaacaagtgaggtagataaaaagaattaacctaatggcttcacttgacttaggcacagttttaaggggcctgacctaggcctggagacctatgtttctagttgggctgtgttggtctttttgatgcaggagtgatgaatctaagcaggagtaccatccaccttcagagccattggcatcgtgaggatagtggtgtgaggtcttttctaagcaggagtgagtccttctttttggaactttttaacaaacactaggtctcctggctggaacaaatggcaggaacctgtctggtcaggaattggattgggatgggctcctcgaacaagtggcaggatgatatcttgtacttgttggagagactgtaggtactgtaataaattagcttgtgatatttctgccaattgggcatctcttagcttaggcaacatagtcagtgccttcctatacatgacttcaaaaagtgagaacctagcctagtaaggggtgcatcttactttaagtagggctaaaagaaggagacttacctaattttcaccggtttttaagattaattttgtaagagtgttttttagggtgtggttcatgcgttctacttacctagagctctggggtcgataggcaccatggagcttccattgaatgttaaacaccttactgaccgactgagctatggacgaggtgaaggccggtccattatcagaccttatggcagcaggcagcctatgtcaagggatgatttcattgagtaaaaactattgcgctggcagtttcgtttttggtagcaaatgcctcagtgcatccggagaaggtgtctgctagtactagaaggtatctgtacttatcctggcgtggttttacttctgtaaagccgatttcatacttttcttctggtgagttttctcagagatggtggcctgggctgggattaggaccttgcttggcatttacctgggcgtaggttgtgcaccggagagctgcttgatctgttaggctttgaagacagggcattcttctttgtttttgatagcctttcctgctgaggtgagtagcctgcactcctggtagatggctccatgaacatgcacagtagcaaaggcgtacctgctgtcagtgtaaacgttaatatccttaccccatcggagaacctgagtgagggcgatcaattcagctttttgcgctgacgtgtttgctggtaaagcctgagcctacgacacatttgtctccgtggtaacagctgcaccggcctttcgtactccctgctcgagaaagctgctaccgtctgtgaacacagtggcgtccgccttctctagggccacatcttgaaggtcaagtcggccagtttcagtagtttctaacagttcctgacagtcatgaatagtagctggatttaaacaccttgtgggagagaaagtcaaacgaggctgatctaacagtaaactctgatactgcaggatgcgagcatttgacatctattcaccagaagcactttaaagtaaagtctctacagcatgaggagccgtaagagttaaattttggcctagaatcaacttatcagccgcttggactaggcttgctgtagccgctacagctcgcagatgacttggctatccggaggccacaggatccagtctcttagataaataggccactgggcatctccagagtcttaaagtctgtagtcttaagcttttttagcaacttcctggctttcatggacaaacaggtgaaacggctttgagatattagggagggctaaagcaggggcttcagttaatgtctttttcaggttttgaaaagtctgttcttttgtgtctgtccaaattaatgggccatttcatcctgtacttcttggatagccactattaagatttttgtttgtcttttgaatgctttatcagtggccttttcagctgcctgtgttgcttatttctgtttttcaaactctcgattgtcaaaaaccttttgggctatttctaaaagctgactgatattcattccagcaaatccttccagtttttggagttttctttttaatatctggggctgcctgagccacaaatgctaaattaggaggacggctattttcgggggccgttgggtcaaaagctgtgtaaatccgataagcctcctggaggcgctctaaaaacgctcctggtgactcatcgggcctctggacgacttcagtcaccttagataagtttatgggtttctgagcagctcctttaatacccgctaggggataccagtggaaattgtctaaagctttccctccacttgaggaatttgggtcttaattaggccgggtagaggggaaaccctcctccaggaggtctctagcttcctcctctggctattggctgatgtgaggttgacaatcatcctaggtgggccgatgtgtctggagtatggactccatcagtgaggtcaaagcctggggcttttcagagaagggaggattatgggttttctaattatacaagtcagaattagaaagaagggacataaactaagaagggggctgagcgcttgtcacctggagggacttgtgcctctcttagtggtagtagaggggctacttcctcctgctgtggcttcagttgaggggcaatgggtggtgagcctacaggaggtgtcgtcgagaagacatgggatgaccttaagggagcaggctggttgtaaggcggtgcgacttggtgagggagactctcctcttcttcagagggaggcagtacagggggagccaaccagccgagggtcgaggcaaaaacgtggtctggctcaggaggactttggaggtagaattattaatggcgcatgaatggagccatggaagagggctcctgaccaaactcagccattgatcaatgtgatcagggtggctgggagtttcggtaacaacctgccacacagcttgaacaattgtaggattcagtgacctttcagggggccacctaactctaaactttggctattctatcttgcagagtgtccagagcttgccttttttaaggcagactgcataatctttggaaaaactgagaaaaattctgtagcatacattggagagggctctaacttttacaaggccgggaggaagtgtttcttttttttcttttcttttttttttttttttaaaaaggcaatttaacagaatttgagcagagatatcagatctaacatggacagagacactcactccctggggggctggagtatcggaaaaacagaattaacataactagaaagaacagaaaaactacaacagctaatactacttgtcacattgctgtagctttaagattgagggaaggggactagaggctagtctgaggtctcctgggttggttggatctaggcgttctcctcctttttcttctagacctgtaccttaaatacctttgatgtctccacaactcaaaggcaaatagctcaaattcagctctttcttttaagggttcaaggagtgagagcagagccaagtcctggaaatgctgaacttgttgtcacaccagaaaatgagatgtgcagcatagggggcagggatgaggaggaaaaggaccactcagatcatccttaagatgagagagtagccacagaggaacagagtaggaatctaaacgaagtaaagcagtacgggcataggtttccttagacagtgttctatttaagagcacaggaaaagttacagaatgacaaaagaggttagcaaggaaatctgcagggtggctattttgaacctactacaaatttaatctagaggaggtctaatcacttggatgtggggtatgacaatctaaatgcctacaacctccatggtgccagaaatcttaatctgatgaatgttcttcacacttgttcctgtaacaacacttgacttgcctctggcagaaaagacaggactgtggtggccagcctaaatgattgatgagaaacttaacctcttgtgacaaaaaatcagcactaaggaccttgaagaagtttttacctagacgtcttgggcaatacttacatcttgacatgcaaaaccttgacgactactaaacaagacaatagacactgaacaaaacaataaacataaaacaaacaattgactttagggcatgtaaacagttataacagttttcctatttattttttattagacagacaaggggagggggtcctgtgatgggatcattcagatgtctgcctggcctctcttgctgaggggacttgggctcctgttataattggcaggccggtgtaaacctctggctcggatcgagctatgcctgatgctgccttaagccttatgaggtcaccacggaactgcaggtgaggacccactcaaactccatagcttttgctgtggagctacaaactggaagacaaacgcaagcccttgtcttccccactcactcaccattcacacagagtttataacaatttttttctcttttctttttttccttcttggagattctccaagaaacttgaacaagagaaagacgagagatgaaaaaagagagagagagactggtctgccagaaactaaggttcagttccccagcatcctgggacgtgaactcagtcaagggagggcccccatcaggaccacttcctacctaaaccaagacacaaaggcacctacgagaaaaccaaggctcaaccttttagcatcctggagtaacgggctgagtcaaaagagggacgcctttgtcagggctgcttccttcttaccagaatcgaagtcaaatctgacctacctgaacctggggtcagaagctgaggactcagatgttgaattttagggcacccacacggtagttgatccgctctcctccggaagacagtcacccttcagggacctgaaaaaaatttttcaggtggcacctccccctataagccagccatctgtcctggggagcccagagcgagaaaggctctcgcccagtggcgttaatatctcactggggcctccaaatcttgtacctgagtaagttagagaaaacaccacactttgagaagaattaagagtccgtttatttagccagcggccaagagacagctaacgctcaaaattctcttggccctgaagaaggggctagattttcttttatactttggtttagaaaggggagggggttctagttaaaacaattttacagaaataaagtaggcaaaaagttaaaaggataaatggttacaggaaagtaagcagttccaggtgcaggggctttaagactattacaaagtgatagactcggggctttgggcgttatcaatcagatgaattcctgggaattgcggacatagcttgccacagtatcttatcagttaattgcattattggatgtgctgggagtcagcctgcacaagttaagtccttgaggaaggggctgccagtgaaagagccaagatggagtctgtctggctctcttagctaaagtagagtcaattcaggtataaacaaggctaagtgattaaaggaaaaaggagaatctaaaaacaaggttagtaaaaacaaagttaggcattacaaaaccattatataaactcacaaatggaaacctagctgacctcaaagatcccaaatcctttccccactcctctttccgttccttgaaaacagctctagagattgctcccacactagctctccctgactcatcccaacattttttattacacacagccaaagtgcagagctgtgcagtcagaattcttacacaaggaccaggactgcatcctgtaggctttttgtcgaaacaacttgaccttactgttttaggctgtctttcatgtctgcatgcagtggctgttgccactctaatacttttagaggccctcaaaatcacaaactatgctcaactcactctctacagttctcataacttccaaaatctattttcttacacttattgcatatactttctgccccccccccaccccctaccccagctccttcagctgtactcactctttgttgagtcctacaattaccattgttcctggcccagacttcaatccggcctcccacattattcctgataccacacctgacccccatgactgtctctctctgatccacctggcattaactccatttccccatatttccttctttcctgttcctcaccctgatcacattttgtttattaatggcagttccaccaggcctaatcaccactcaccagcaaaagcaggctatgctatagtatcttccacatttatcattgaagctactgctctgccccacctccactacctctcagcaagccaaactcattaccttaattcaagccctcactcttgcaaaaggactgcatgtgaatatttatattgattctaaatatgcctttcatatcctgcaccaccatgctgttatatgggttggaagaggtttcctcactatgcgaaggtcctacatcattaatgcatctttcataataacacttccaaaggaagatggagtccttcactgcaaaggccatcaaagggcctcagaccccattgctcaaggcaacaattatgctgataagacagctaaggaagcagccagtattcctacttctgtccctcatggccagtttttctccttctcatctgtcattcctacttactctcccactgaagtttccacctatcaatccctccccactcaaggcaaatggttcttggaccaaggaaaatatctccttccagcatcacaggcccattctattctgtctgtcatcatttctttctttttttttttttttttttttttgagatggagtctcgctctgtcacctaggctggagttcagtggcacgatctcagctcattgcaagctccacctccggggttcatgccattctcctgcctcagcctcccaagtagctgggactacaggtgcctgccaccatgcctggctaagtgattctcctgcctgagcctctcaagtagctgggattacaggcatgcaccacaggttgtagagtttgaggggtcagattcttaacaagaactgattgttcagctatggtgtcttcatatggctgggaatctgaagtaggcaagagaagattagcagcctggcaaatttcctgtctagcttgctagaggattggaacatagacgcctagagggctggtgtctgggatgaggtcggggccaagcaagaaagtgcatccatataaaagttcaaatggactgtaccctttagcatctcaaggacaggctctaattctgagaagggcaagaggtaaaagtactgtccattctgttttaagttggtggctgagcttggtgaggtgtgtctttaaaagaccattagtccgttctacctttccagaggattgaggacggtaagaggtatgaaggttccactgaatatcaagagcctgagaaactactggggtgatttgactaataaaggcctgtcccttttcagactgtatagaggtgggaaggccaaaccaaggaactatgtctgacagaagggaagaaatgacggcagtggccttctcagaccctgtgggaaaggcctctacccatccagtgaaagtgtctacccagaccataaggtattttagtttcctgactcagggcatgtgagtaaagtcaatttgccagtcctgggcaggggcaaatcccaagcttgatgtgtagggaagggagagggcctgaacaatccctgagagtagtagaatagcagatggaacactgagaagtgatttccttgaggatagcaatttcaattgctcttttttattcgtggccaggcatggtggctcatgcctgtaatcccagcactttgggaggctaaggcgggcagatcatgagatcaggagatcgagaccatcctgactaacatggtgaaaccccatctctactaaaaatgcaaaaaaaatggcgtgaacctgggaggcggagcttgcagtgagccgagatcatgccactgcactccagcctaggcgacagagagagactccatctaaaaaaatattaaaaaaaaaagacattgtagccaacaaatacatgcaatgattatattttgattaaaaacataatcttttaaaaggagcaattattttttattcaatgaatctttgatacagtcactttaaattcttaggtgttaagcctataaatgttcaatggcttaggtaatgtcttatactgcatatcctacatgctaatcactgtgactatcagattctcttttgttcatagcattttttaaatataatattttgtttttcttattaaaatttatttttctgtcatgcctaaatcttgataaaaataaagaggatgggtttgcctgatttattccaaagtcaaatagcagttttgcttttttctttttagtcagtaactcatttgtttcacacaataaacatgagaattaaataattcaattatagttatatcctcatgctaacaatggagaaatatttgagttattttttgatagggctaaaatcttattttatatttttattacagattatttcatgtcaagtgactagaatatgaattttaataatatactatgaaattagaaaatgtgatagtcacagattatggaagtacagtgaagaaatagattatattaagaggtgatttattatatctataataaaatggagtatataaatagccatataacaagtaaagtaaaaaggttacttaaaatgtttttacataaaaagctcagtgtcaagttgcttaaattttaaattttaccaacacttaatgaaaagttgataccaatttcccacaaaaactgtgagcaatagaagaggtaacatttcccaattcatctattagccaggattaccatgaccccgaaaccagacaaaagaatcagaaataatgaagactatggaacaacgtcccatataaatatagatgcagaaattttcagaaacactagcaaattaaatccagcaacatatgaaaatgagttcataccatgaacaggtaatattttttcacaaatttagtgttgacttaatatttaaaaaatcaactaacatattacaaaatagtaattactcacaggttttgtcctggtcgcttcacctgtgcaggacccaagaatctgctctgctcttgttgctctaagaagccaggtgcttaaccatgagaaccaggagaaagaaagctgagggagccagaagaggaagcgagctacagaaagaggggtgacaggacctccaggcgcagggtgcttcgggcagggaggcgggcagggctggcggctgcctgggtcaggtagcatgaggtggatctgagggtactcacggacaggatgttccagcaacgaaaagagcagaagctccagcttttagttgcatggccattaccacgaccaaacaatgggaaaaggactgactctccaacaaatggcaccagagaacttcatgtttaaattaaaaaaaaaaaaaacaaaacttgggtctgggcgcggtggctcacgcctgtgatcctagcactttgggaggccgaggcgggcggaacactggagatcaggagttcgagaccaacctgaccaacatgacgaaaaccctgtctctactaaaaatacaacattagctgggcgtggtggcaagtacctgtaatcccagctactcgggaggctgagtcaggcgaatcgcttgaacccaggaggcagaagttgcagtgagccgagatcgtgccactgcactgcagcctgggtaacagagcaagactctgtctcaaaacaaaaaaacaaaaaccttggacccttttttttttgcatattatacaaaaaatgtctatgtatgcaaagcagaaactggaagtaacatttgcatactcatgttgataatcatattattcacaaaaccaaaacttggaagcttcttaaatgatttttgatgtataattttttttttttaaattgaaacagggtctcactctgtcgtccaagttgaagtgcagcggcgccatctcggctcactgcaacctccgcctccggggttcaagtgattctcctgcctcagcctctggagtagctgggattacaggcgtgtgccgccacacccggataatttttgtaattttagtagagacggggtttcaccatgttggccaggctggtctggaactcccgacctcaggtgatctgcccacctctgccttccaaagtgctggggattacaggcttgagctctcacaccgagccgtataaatggatttttaaaatggcatatacatgcgatggaatataattataccttataaaaggaaattacgtcacatgctacaatgaagataaacctttagggccagtgtggtggctcactcgtgtaattcagtttgagagggtgaggcaaaaaaatgttttgagcacaggagtttatgactagccgggcaacacacacacacgcacgcacacacacacacacacacacacacacacacaaaggataaacctttaggacattatgttaagtgaattatgccaggaacaaaataacaaagagcatataatttgatttacatgagatatcttcagtagtcaaattaataaaaattgaaagtagaatggtgcttgtcaacaactggggtagggggtaaaaggggaagttcttgcttaatgggtttgaattttgagttttacttttgcaaaatgtaaaagttctaaaggtcttttgcataacttttttttttttttgatactgagtcttgctatgtcgcccaggctggagtgcagtagcatgatatcggctcactgcaacctccacctcccgggttcaagcaattctcctgcctcagcctcctgagtagcggaaattacaggcacctgccaccatgcctggctaatttttttattgcataacaattttaatacacttaatactactaaactataaacttcatggtcaaatatatgtaataacattttaaaaagcataattattaaaagtatacaatttttaattaaataggattgactttgcatcttctttgctttatgattatgtaaaagttttacttccattatcatgccaattttctaccttctctttctttttttttttttgtttttttgagatggagtctcactctgtcccccaggctgaagtgcagaggcatgatctcagctcactggaaactttgcctcccgggttcaagcaattctcctgcctcagcctccaagtagttgggactacaggcacgtgccaccatgcccggctaatttttgtatttttagtaaagacggggtttcaccatattggccaggctggtctcgagctcctgaccttgtgatccatcctcctaggcctcccaaagtgccaccaatcccggccattctaccttctctttctaatcctactgagattttcttaactcttttctattcttgcataattaataaattcaatgcatttctctgagatttattgtaacaatgaaatttttacttttactttttttttttcttgagacggagtctcgctctgtcgcccaggctggagtgcagtggtgcaatctcggctcactgcaagctccgcctcccgggttcacgccattctcctgcctcagcctcccgagtagctgggaccacaggtgcccgccaccacgcccggctaattttttgtatttttagtagagatggggtttccatgttagccaggatggtctcgatctcctgacctcgtgatccacccgccttggcctcccaaagtgctgggattacaggtgtgagccacggcgcccagctaagatttgtttcttgttcatagaattgttacacagattaactgcatttttactagtttttgtctttattccaaaatccaggctggtgaagcggcttctctctacattttactgattttcatggcttagagaaaagaagcagttggccgggcgcagacgctcacgcctgcaatcccagcattttgggaggctgaggagggcagatcccgaggtcaggagttcaagaccagcctggccaacatggtgaaacaccatctctagtaaagatacaaaaaattagccgagcatggtggcgtgtgcctgtagtcccagctacttggaaggctgaggcatgagaattgcttgaacctgggaggtggaggttgcagtgaggtgagatggcaccactgcactccagcctgggtgacagggtgagactccatctcaaaaaaataaataaataaataaaaagaagcggtcaaccacacattgactcttaaaatttatgctcagaagggacacaccttactttagtctattttcactggccaaataaagttaaatagccaagtctgatgtctatggggtaagaaaatataattctcttgggagggtcatcaaatatcaggaaacaataatacaacttaccacaaaaccttcctactcagctgaatattaaattataatatagtcattcataaacaaaggaactttgcatttaatactatttattagtaataatatttaatatctattgtttgcttattttctgctagaatcaatgatatgcattttatttttttaatttttttagatagggtctcactcttttatccaggctggagggcagtggtgtaatcacagctcatggcagtctcaatctcttgctgaaatgatcctcccacctcagcttcctaggtagctgagattacaggcatgcaccactgcacctggctaatttgtttcattttttttttttggacagatggggtgtagctatgttgcccaggatgctatccaactcctttgctccagcagtctacctgtcttggcctatcagtgctggcataggctgctgtgcccagccaatgataagtgggtttttttttgtttgtttttgttttgttttgtgttgttttgagacggagtctcgctctgtggcccaggctggagtgcagtggcatgatcttggctcactgcaacctctgcctcccgggttcaagtgattcttctgcctcagactcccgagtagctgggactacaggtgcccgtcaccacacctggctaatttttgtatttttagtagagaccaggtttcaccatattggccaggctggtctcgaactcctgacctccagtgatctgcctgcctcggcctcccaaagtgctgggattacaggcatgagccactacacctggcccatcataagtattttatatgtgctatttcatttaaatgtaagaggctggtatataattatccctattttaaagatgaagctagtaaaatgtagtgaagttttgagttgcataaataatgaagtagagctgcctctaatccttagtaaattgccatacgcacactaatagtaacaatgtgtcagtttataaatgcgcatgaagttgtacccaaagctactgatatttttctttactaatttggattatccttggagctgccatgaataaaatatccatctagagcccacaagagagcagcacatctgagaacaaacatgaaaacaatgaagcagccacttttagtgagctcagcagaaccatgggttcaaactctactgaccatacttataaaccatccagggctccaggacaactaaaactgtggcttctaataatggagaaccacctatgacatttaaggtgtgactttttaaaactgaaaagaacaaatatgattactgctaacgtttttattctgtttatttgactttgaggatgaatgagtagatgtaagagagggcaatgatatgtcttaatagtcttctgaagtaataaataatttgatttggtctgtcagaagtctattggctactaccaaacaaaccacagttatcccgcgttcaagcgattctcctgcctcagcctcctaagtagctgggactacaggcgcctggctaattttttgtatttttagtggagacggggtttcaccatgttgtccaggattgtcttgatcacctgacctcatgatccgcctgcctcggctggcgtgagccaccgcgcctggttggctggagtgcagtggcgcgatctcagctcactgcaacctgcgcctcctgcgttcaagcgattctcctgcctcagcctcccgagtagttgggattacaggtgcgcaacgccacgcacagatactttttttttgtatttttagtagagacggggtttcaccatgatggccgggatggtctcgatcacttgacctcgtgatccgcctgcctcggcctcccaaagtgctgggatcacatgtgagccaccgtgcctagcccaacagcatcatttttatctaaagctgtagttcagcaaatgctataaggtgaataattaaatattatttactacagacccaagcagtctactatgattttattaccctttaatacaaatttatttcttgaattaaataattatttctctattttagttgtattttctttgtgtctgttgctaagttttgctgaaatactaccattttacttaaacttgccccacagttttttatttgtttaaaaaacttcaaaaaaaatattgtaaacatgacagcttgcattggtagtcccagctactcaggaggctgaggaaggataatttcttgaacccgggcagtggaggtttcagtgagctgagatgtcgccattgcactccagcctgggcagcaagagtgaaactccatctcaaactaaaaaaaaaaaaaaaaaaaaagaaaaagaaaaatgtagaattcaatatgctaaaacaacttttttatatcaaatatatacatcatattgatggttgtctgatacgaatattaagtgttctgtattagattttgcaaaatatataatttttttgcacgagtcatgagcaaaagcccaactattcaaatggccataaaaaatgatttttttgaaaaataatatatgattttaaaaagtttgggccgggcgtggtacctcgcacctgtaatctcagcacttttagaggccgagatgagccgatcacctgaggtcaggagttcaagaccggcctggccaacatggtgaagccctgtctctactaaaaatagaaaaattagccaggcgctgtagcatgtgcctgtaattgcaactactcgggaggctgaggcagcagagttgcttgaacccaggaggtggaggttgcagtgatccaaggtcgtaccactgcactccagcctgggcaacagagagagactccatctcaaaaaataaataaataaataaataaataaataaataaataataaagagcaaaacaccatctcaaaaaaagaaaattaccattctctgctctttttttttggttcgttttttgggtttgtttgtttgttttgagacagaatctctctctgttactcaggctggagtgcagtggcacaatctcagctcactgcaacctccacctcccgggttcaagcaattctcctgcctcggcctcccgagtagctgggattacagccatgtgccacgacacctggctaatttttgtatttttagtagagacagggtttcaccatgttggccaggctggcctcgaacttctgaccttgtgatccacccacctcggcctcccaaagtgctgggattacaggcgtgagccaccacgcctggccaacggttttcttttttacagatgagggtttgctacattgcctaggctgttctcaaagtcattggctcaagcaatgaggctcctgcctcagcctcccaaaatgctcgctgtaatatttaataatacttatatgagtcaagtgtgctggctcatgcctgtaatctcaacactttggaggctgaggggaaaaaatagtttgagttcaggagattaagacgagtcttggcaacatcgtgaaacctcatctcgactacaaataaaaaaatagtaagtggacatggtgatacatactacagtactagctacttgagaggcttatgtggaaagaccccttgagccctggagatcgaggttgcagtgagctataatcacaccactgcactccagcctgggcaacagagtgagactctatctcaaaaatacttatagacagaatgcatttatataattttgttattcactgtattggattaacttataaacaaaaaatataatacagtcaaaggcggaatcatccctttctagtctttcttttgcctttcatgttagctcctcactcccaaagcaacccagcctgtagggctagatgttgccatgctgccaactgtttacattcttactctgataccacattagcttttctgagcatatctctcagagaagaattttgctttatatttgtgtatgtaagagactataaggttggctttcttactacttctttttcaatgattaaaaacaaatcctggggccgggcgcggtggctcacgcttgtaatcccagcactttgggaggccgaggcaggcggatcacgaggtcaggagatcgagaccacggtgaaaccccgtctctactaaaaatacaaaaaattagccgggcgtggtggcgggcgcctgtagtcccagctactcgggaggctgaggcaggagaatggcgtgaacccgggaggcggagcttgcagtgagccaagatcacgccactgcactccagcctgggtgacagaacgagactccgtctcaaaaaaaataaaaataaaataaaataaaaaaacaaaaaaaaaaacaaatcctgggccagacgcagtggctcacggctgtaatcccggtactttgggaggccgaggtgagtggatcacccgagatcaggaggtcaagaccagccttgccaacatggtaaaaccccgtctctactaaaaatacaaaaattagccaggcgtggttggtggccggcacctgtaatcccagctacttggcaggagaattggttgaacccgggaggaggaggttgcagtgagcccagatcgcaccattgtgctccagactaggtgacaagagtgagactctgtttcacaaacaaacacacaaacaaacaaacacacaaaatcttggctgctggcaaccaggcacagccaagtaaggtgagggcagaaagcagatacttgcaatccatggtgcatcagcttttttaacatattttttctccccaactacatagaaaatatcctaagtgatctcatgcatctttgaatccaaacatctcattttttgccttatccatattacaaacgtattcacaatttataatgcataatcaatctattggaaaatattcaaaacaaatgcattctcttcatggaaccaagtagtacacctgaattaaaatttgtattgagaattattagtataataattttttaaaaaattattaagtacttttagatgtttagcacttggaaaatattataaaaaccctctcaaaattaacctgggactccaaaagacatgtatggtccaaacagttcttttcttcacaacaccgaggaatggcatacaaggctgtctccaagaggtcacatctcttccagaccttaacgaaccttaaaaataatttttcatgtgcagtgactagcaagaaatcaaagatgacaaagctcacaataaataagacagtgtgaaatacaccagaaaaaaaataactgaagcaaatttgcaaagacatctaatattagaattatcagatacgaaaatattaaaaacaactacgcctaccatattacaagaagataaagtattggcaggaaaaaaaatattaaaagttttaaaaataactaagttgtggctgggcgcggtggctcacatctgtaattccagcacttcggtaggctgaggtggatcacctgagatcaggggttcaaaaccagcctggccaacatgataaaacctcatctcaggccgggcatggtggctcacgcctgtaatcccagcactttgggaggccaaggcaggcggatcacgaggtcaggagatcgagaccatcctagctaacacggtgaaaccccgtctctactaaaaatacaaaaaaaaattagccgggcgtggtggcgggtgcctgtagtcccagctatttgggaaactgaagcaggagaattgcttgaacctgggaggcagaggttgcagtgagccaagattgcgccactgcactccagcctggggaacaagtgtgaaactccatctcaaataaaataaaatgaccaagttgtagaatgaataatacaataactaaaatgaaaaactcgctagtcacatttgaacttatgtgcacaagacagaaccagtaaactagatgctagatcagaagaaattaacacataggcaacaaatgtcagtctcagaaaacttttctggtaagttttccagacattcaaaatttaaaactgaaaagcataatgttgatattatttagcctcttccaaaaaatagagtaagtaaaaaaccctgcataacttaattcctgagttaataccaaagcttgacagaaacaaaatgagagcaactatagacaatctcattaagacaaatagaaaaaaatgttaaagcaattgctaacaaactaaattttgctctgtaaaaaataaataaaaccataagtaagtttggtacagtataagttgaaattgtaaaatctacatgtctatatataataggcacagaaaaagagtttggtaaaaactttttagcaaactagaaataaaagaaaatttcattttattttctaaatatacaaggtatctaaaataaactacagcaaatgtaaatgtacaactattgaaagcttgtcttttgatgtcataaacatgataatgatgctgctgtcgacgtttttattaaacattgcatgtatggctccagccaacaaaataaaatgagaaattagtattacaattatattggcaaagcagaactagtcaataaactagtacctaaacaactgttctacctaggtagattgcatctctgcaaagcaactcacacaaaaattgttcacatagatcgaggatttaaaacttttgggagaaaatagaggataacattgtttttattaaaggaggagaccacccctcatattgtcttatgcccaatttctgcctccaaagaaagaagaagtaaaaactaaaaggcagaaatgaaatccacaggcagacagcccggcgccatgccctgggcctggttaaagattgacccctgacctaaccggttatgttatctatagattccagacattgtatggaaaagcattgtgaaaatccctgtcctgttctgttccgttctgattaccggtgcatgcagcccccagtcatgtaccccctgcttgctcaatcgatcaggaccccctcacgtggacccccttagagttgtaagcccttaaaagcgacaggaattgctcactcagggagctcggtttttggagacgtgagtcttgctgaagctcctggccaaataaagcccttccttctttaactcggtgtctgaggggttttgtctgcggcttgtcctgctacattataactgtggggtaaaaagacttattaaacatatagaaatagtgcataggctgggcacagttgctgatgcctgtaatatcagcactttgtgagctccaggtgggtggattacttctggtcagaagttcaagaccagccaggccaaaatggtgaaaccccatctctactaaaaacacaaaaattagcgaagtgtggtggcacatgtctgtagtctcagttactactcagaaggctgaggcatgagcatcacttgaagcaggaaagcagaggttgcagtgagctgagattgtgccattgcactccaccctgagcgacagagtgagacttcgtctcaaaaaaaaaaaaagcatgaaaatatgtataaattagactatatcaattttaagaatgtttaattatcaaaatcttataaaaacatgttttagtaaaaatagtggaaaaagcacatagtggaaaatgttttaaaaacacctattacaggctgggcccagtggctcacacctgtaatcccagcactttgggaggccgaggcgggtggatcacctgaggtcaggagttcaagaccagcctggccaatatagtgaaaccccatctctactaaaaatacaaaaacttagcaggcgtggtagtgggagtctgtagtcccagctactcgggaggttgaggcaggagaatcgcttgaacccaggaagcggaggttgcagtgagccaagatcgtgccactgcactccagcctgagcgacagagcgagcctccatctaaaaaaaaaacaaaacaaacatgttaaaaatatcagcatttagaaaatatatattacagaatatgtgtgcataaacaaggaaatgacaaacatttaaaataggacagatggcaaatcttaaaacaagaacttataaaaattgctaactctattagtaagcatggaaatgctaattgaaactacaaatgatacactttctttttttttttttttttttgagacggagtcttgttctgtctcccaggctggagtgcagtggcgtgatctcggctcactacaacctctgcctcctgggttcatgcctttctcctgcctcagcctcccgagtagctggactacaggcgccggccaccatgtctggctaattttttttttttttttttttttttttttttgagacggagtctcgctctgtcacccaggctggagtgcaatggcgcaatctcggctcactgcaagctccgcctcccgggttcacgccattctcctgcctcagcctcccgagtagctgggactacaggcgcccgccaccacgcccggctaattttttgtatttttagtagagatggggtttcaccgtgttagctaggatggtctcgatttcctgacctcgtgatctgcccccctcggcctcccaaagtactgggattacaggcgtgagccactgcgcccggccaaattttttatatttttagtagagacgggggtttcaccatgttagccaggatggtctcgatctcctgacctcgtgatccgcccacctcggcctcccaaagtgctgagattacaggcttgagccaccgcgcccggcagatacacctttctaatttaccattttgtcaaataattatgtctagtagttttaagagttgataaaaatgtgaagtaattcaaatatccactggcaatagacgtggtttataaattgatgtatgtttgcattatgcaacagtaaaaatacagaactaaaggccgggcacggtggctcactcctgtaatcccagcactttgggagaccaaggcaggcagatcacgaggtcaagagatcgagaccatcctggccaacatggtgaaaccccgtctctactaaaaatacaaaacttagctgggcgtggtggcacgcacctgtaatcccagctactcgggaggctgaggtaggagaatcgcttaaacccgggaagcgaaggttgcagggagcggagattgccactgcactccagtctgggcaacagagccagactctgtctcaaaaaaaaaaaaaaaaaaaaaagagacctatagctatgcaaagcaacatgaaaaaatagaaaaacaacataaataagcaagtcacagatgaaaagttatgctagaatatacatacaggcaaaaaataggcaacactgaaatgtatattgtttatacttaaaattgcataaagtaaatggtaacagaggccgggcgcggtggctcatgcctgtaatcccagcactatgggaggccgaggcaggcggatcaccaggtcaggagatcagtaccatcctggctaatatgatgaaaccccatctctactaaaaatacaaaaaacattagccgggcgtggtggcacgcgcctgtaatcccagctactccggaggctgaggcaggagaattgcttgaacccgggaggcggaggttgcagtgagccgagatcccgccactgcactcccgcctgggcgatttcaaagcgagactctgtctcaaaaaaaaaaaaaaaaaaaaaaaaagggaaataacacaaaattcaggtagtggtcactttggggtaggaggttaatagaagactatagaggtattgactttacaggagtgtgtgacgattttatgcagcaagactgaaagttttaaaagagtaaagaccaatacttttatttttttcattttatttcctaaggctagcaaaaagtatggcacaaagtgtgtgctccacacacatttctaggttaaatgaatgaatacatcccctttgtaagctgtcaagctatgcaaaccaagactttattattattagttactatagattagtttatagaatcaaatgaaaggtaatgaactgtgggattcagaaagcactattgaaagttcaatgttaccccagcattcttaggtaaaataaattaaaatttttagtttctaaatttgcgaccattataattacatttaatttgccacgtgtagatggaacatgaaatcttacttcaggcgagcataatttgagatgaaaaggcaaaaaggaaaaaaatttaaaaagaataaaaacttgattgagtcaaatctgcaagttctactttatacttaaaaaaaaaattgtttccttctctcctgacccagagtgaggctggctggggagcctgggtccctctgtccttcccgcggtggcagtggctgatctctgctccggcgtgagaggcgccgccctgcgctaggccggagtctgcccggcccagcccctcctcactcccttggactcttcacggtgtctccgggcccctgcacaatcctgagcgtccctcacatggaagccgaggtggtagcaggaagctggtggaaggaactggctccgcaggcagggaggtctcgcccaggaaatgctctgttggcctcggcttcctgcgcacgcagctgggcccggacccagggttggagtcgagacgtacccgggctggacgaccccgggcgttggcgcgcccgctgctgcggttcgtgctgtgctcggctcggctgtggaggaaggttggatcgaggctggaggccagaagtgcaggagccgcctcgcaggcgggaggagtcggtagccatggtctctgaaaactgggccctgtaaacaattttcaggcgccaggaacagaagaaccggcagaaacagccctagagcttgagccaaatggacggactgttggcgctgctgagggcgaaggtgcccaaactcctcaaagtggagcagcaaagcaaccaccagagatggacaagaaaaatgaaaagtcaaagaaaattagcagaaatcaaaggcagttgctaaagcagtgagaaaccgttcacgccacgatggaaaccgagttgatgaaggagtctgggaaacgaatctttttttttttgagacagagtctcactctgtcacccaggctggagtgcaatggcgtggtctcggctcactgcaacctccgcctccggggttcaagcgattctcccgcctcagcatcccgagtagctgggactacaggcgcgtgccaacacacccggctaatttttgtatttttagtagagacagggtttcactatgttggccaggccaacatacagggcaactcacttctttggttcctccaaactgaggcctcacgaaggctcaaatatggagtgagaaggactcaacaacagagcatgcaaaacaaaaaggatgaggtaggatggtcagctctaaggcttagggagtgcctgggggatgccaacataatgattgcagctataaagcttactgggtagaaataaacataaaaagctgaaaacacaatggcttgaatttggtaaaaaaacagtctctggaattgtagcagttgtgccaaaataattgagcaagaatgacatgcatctaaggattattaaggggaatgtttacaagcacacaaaaatttgttcccaaatcttattacagtggtaatattattttccgtaatgacagtttccccaagctaaagatgccatagagagactaaggcaagtgcctaatatgttgtaggcagttagtttcaaaatttaacaaacttacaatgattttatgaattcaattgaactgtttcatgtataaatttcactaaaaggcactgtctagtagctatttctctcagtttttctggaatttttctgtttcttgattccaaatcaaccttacttgattccaaatcaatcttacttgaatcccagtcatttctaaagcctcagatgtaagaacagaaaaacagcagaaatgaagccaagttaccgcaaacagtccacgtctaatacatttggcttcccacatgaaccaaaaacccccacaagctaaacaacagtgggtttaaaattcaacctaaattcaacaatagcagtcacagccatatgtaaaaattagcaaatcacaatgtagaaaactttagtctgttattgcattgttattcttaaatatctactatatttagacaagactttcaataaaaagtacttatagctaccatgtatgaattaaaacagccctgggggaaatagtattttttattaatgatgaagactgaagctccaaggatgtaaaataatttctactaggcacacagctaatgacccaaatcaagctcatatatgtttgattttaaaatttttaatgctctcactgttgacaatgttggcaaaacttttcaatcatagtttcagtgttggtgcttgggaataaatcacaagtactactgagggaggatgggtagtcaagaaagtgatcatgtccttgggatgcagcaaccacggcgattgcatggtgactgtatattgtcaacacaataagtcccagcatttgcttcgtattccagctcaatcaagcaaagctctctccaataggaaaattttcctgtaaagagcatgcacatttttattttacttgtcctcagactgacctgacctcttactcattattaatagtaaaaaaccatgcccatgggtagagatttagaatgtcatcgagacatgtgacatatgaagaagcatgtacagccactgtgtatgtgctccaagaggaacacccagaacatgcttactagtaacacctctccccttataaataattgtgtaaggctcccgtaagtggagtctccctagttcctttctttcctgtctcattcttacagcctgtcttgaatccctttctttcagggtgtactggctattctgcatctaacttttttttttttttttgaggtggagtcatgctctgtcgcccaggctggagtgcagtggcatgaactcggctcactgcaacctccgcctcccgggttcaagtgattctcctgcctccgcctcctgagtagttgggactacaggcgtgtgccaccacgtcaggctaatttttttttttttttttttttttttttagtagagaaggtatttcaccatgttagccaggctggtcctgaactcctgacctcaagcaatctgcctgcctcgccctcccaaagtgctggggttacaggtgtgagccaccacacctagcctgcacctaacttttaaaagtctttgtttcgcaataaattaccctatgctgcatctcctttgttgtgtgtctcatgtttttttgttttttaacttagaagacaaaaactgaggtctcacaacagccattaacactatcgcactttgttttgtattttttattataaacattttattctctgatatgtcaacattcacatttcaaacagccaacttatattgaagtctactatataacaatgctaaattgaaaatttaaatgatcaggtagggcgcggtggctcaggcctgtaatcccagcactttgggaggccgaggcgggcggatcacgaggtcaggagatcgagaccatcctggctaacatagtgaaaccccgtctctactaaagatagaaaaaattagccgggcgtggtggtgggtgcctatagtcccagctactccggtggctgaggcaggagaatggcgcgaacccgggaggcggagcttgcagtgagtcgagattgcgccactgcactccagcctgggcaacagagcgagactccgtttcaaaaaaaaagaaaagaaaatttaaatgatcacaaaatgatttgtcataaaagcatgtatattttacaagtttcagctttatcacactattcaatttcttaaaacaatttctgacacaaataatcaaatatttaatgatttggattcaattccaaaataatttacattcgtttattgttatatgtacttttgacaaaggtggatttgaaaactaagaaaaaactaaagcatgttcttatttttttttttttttttttttttgagacggagactcactcttgttgcccaggctggagtgcagtggggtaatctctgctcactgcaacctccgcctcccaggttcaagcaattctcctgcctcagcctcctgagtagctggaattacaggcagacgccaccacgcctggctgatttttgtgtttttagtagagacggggtttcaccatgatggccaggctggtctcgaactcctgacctcgtgtttcacccgccttggcctcccaaagtgctgggattacaagtgtgagccaccgcgccctgctaaaccatgtttttaaaggttcaagggacttaagcttagagacacaaatgctctgtagtaaaataaataaagcctcatctttttatcaataatattttaatagttttatgtctgagcacttaagcatcaagaacacgactctggatgatgttgagggaatacttaaatggataaaatagaaagtgatcatcggagtctaataagtgatggatacagcaacataatacttgacaaaaccattcagggtgtgtttgacaaacacggttacataggagctgcactgcatgattaatgtaaagtgttttgtccctaactttagtctttattctcaatcttacaaatatcacatactcacatacacagaataattaacttttttttcctggaaggcagtgtttcatcttttattatgtctgtttcacattgctgtaatgatgctgttgaagtacactctttcaccagaagattacctgtgtgaatttgaatagactgacactggataggaccagctcagcacactcacttgaactgtcttgcttttcaggcagttaaaatgcctttgaagagtgaaaatatactgactgctgattatgcagaaagttttacattaggccgggcgcggtggctcacgcctgtaatcccagcactttgggaggccgaggcgggtggatcatgaggtcaggagatcgagaccatcctggctaacaaggtgaaaccccgtctctactaaaaatacaaaaaattagccgggcgcggtggcgggcgcttgtagtcccagctactcgggaggctgaggcaggagaatggcgtgaacccgggaagcggagcttgcagtgagccgagattgcgccactgcagtccgcagtccggcctgggcgacagagcgagactccgtctcaaaaaaaaaaaaaaaaaaaaaaaaaaaagaaagttttacattaaaaaagcttgtcaattgtttgaaaattacatcgcatggcctacaacttttaaaatgtaaaatgcataaaaatactgcacaacaaaatagaaatgatggagttggccacaaaggacagccaaatctgtatatagcaatatagaaatgtatctactgtcagagtgaggtaacttgaagtatttgagagatgttctctaagaatctaaaattaattttagtttcagtgtccatgttttttaaggatttttaattttcaaaaaatgtttaaatgtgtccattgttttattcctagaaataaaaacggaaggaaaaaagaggtataaaaacaaatgaaatagaaggaagaaagtggattactcacaatagctaaggtatagaatcaacctgtgtccatcaaccagtgaatgaataaagaaattatagtatatttaccgaatggaatgatatccatttctttaaaatagaaagccttgttatttgcaacaacattgataaacctagagaacattatgctaaggaaaataaggcagcacagaataaaagtatatcacatgatctcatttctatgtagagtgtaaaaaagtttaaattcatagaagcagaaagtagaatgataattgcctggggctggaggagatgttgatcaaaaataataggtcttgtctacatctcttaagttaacaaataagttattctcctctcaaattggattaaccagggaattcaatcatacactgaagaatcaatactgaagaaataacacatttgttatagcaatgatggttgtataccgaaatttcagaggcttagcaaaataatatattctctgcttagatcaccatgccctgatggttttctttttctggttaagaggacgtcttcatgatctttcacgaataatattttctttcatcttctatctgcattctcctttcttcagcgaatggatgaaaaaaaaacgatgcagagaagacacatttgcatcttacccacacatcacttttactattaggcaaagtgggtaagcaaaataggcatatacatgaataaagtgcttgtggtaaaataatcattttgttgatttctatggagctcaggttatagatcaaaagctaccaaatataagcagaaaagagtattatttcaaataagaatactgtgaatgacattattctgtcaatagaaaaccataaccttatcctaatagtctcacctatatttgtacatcaaattctttttattaaaaattgtatttcatataaatatgcaagttatatcaccttttttttttaccatttcaatgtcttcttcactctatgttagtggaaaacaggccagctggtcccaggaatgataaagagcacttgtttgggtgatactcctgtgccaaacaccgttatttggcccaaggtactggttttctatttttctctacatttagtaataaaataaaattcttagctaagaagacttgatctcattcaaatatggtttatggaatatggctgacatttaagagtctctgacttatcttgaatattgacttttttatgaattcaaattgagtactataaataatcttttactaaaagcctttgcagagtaagattaataaaatttctttataatataaaaggaatatgttaaccatgcttccagtaatcactctgaccacagcattctcaatttccagtattcaccctgagtcactcaggggaaattggtatttgtaaacaggcagaataaggtgctgttgagtggaggtgaaccacactgcacataatgctttctacatgcacctcttaggctcttaatttaattggactgtcatttatatggctagatacctactcaacctaatcatactattttttagcagctaatgacatgtgttacccattagtcctgtacaactatttgactggctgaaaaatattttgttaatttactttaaattgagagactagatttgcgatcttcaatctttcagtgttaaagcaaatcagagaagcgcaatgcacatagaatgctccttctcttccttttccttttgttgttgttgttgttgttgttgagacggactctcgcgctgtgcaatggcgcgatctcggctcactgcaacctttgcctcccgggttcaagggattctcctgcctcagcctcccgagtagctgggattacaggtgcctgccaccacgcctaattttttaattttttgtagagacagggtttcactatgttggccaggctggtcttggactcctgacctcgtgatctgcccgcctaggcctcccaaagtgctgggattacaggggtgatagaacgcattttcctgcccaacatacttcttctttacatagaatatattccattcaaactatttagccaggattttagatttcaaaaggtcaagaacttaataattgagtgaagccaaaatattgtctttgcttcttgttagcaatctagccatttcaaaaagcacagcaattatgccaagccattgaaagcatgcagttaactttatcccatttcaaaaattgttacttttatgttaatttaagaggaactatctacataactttacatgcattcaaggaatatatatatttgctggatgcagtagctcacacctgtaatcccagcactttgggggccgaggaggtaggatcatgaggtcaggagttcgagaccagcctggctgacatggaaaagctccgtatctactaaaacgacaaaaattatctgggcataatgatgcacctctttaatcccagctactcaggaggctgaggcatgagattctcttgaacctgaggcagaggttgcagtgagccaagattgcaccactgcactctagcctgagcaacagagcaagactctgtctcaaataaattttcatattaaggtatttaatattcaatattgtatgacagtatagtggaatcctcaaaaatgagcataagtttattattaataaatttattaggccaggtgcagtggctcaagtctgtaatcccagcactttgggaggccgaagcgggtggatcacaaggtcaggagttcaagaccagcctggccaacatggcgaaaccctgtctttactaaaaatacaaaaattagctaggtgtggtggcacacctgtaatcccagctactcaggaggctgaagcagaagaatcacttgagcctggtaggtggaggctgcagtaagctgagattgcaccactgcactccagcctgggcaacagagtgaggctctgtctcaaaatacataaaataaatcaatcgataaaattattttttcaaagtttttcaattgttaaagaatcaggtatgcttttcacgataagttcaattttaggagggtacccactggtctccatgttatttctgtaatggatagtataaaactgggtcaccagaattatgcagacatgctcatttaatcagaatgagttcagcctttgtgctgtattggtatctcaggagctgatcattcactacaacttagtaaatattgctccataatcccagcaaattctttcaaccacgtttccttttttctctcattgatgtggtcatgttgtggtctcctctgtttatcttcagctatccctgatgagaggtgattatttattgcatgaatgagaccccctttttttcctcttccttgggatcctcctgccctccctactggaagcaacatgtgagaggcaggaattatgacaatatacaaacatatttcctgccaggggaccactataagaagcttacaacatgacccatctagaagtcacttacttccaggccagcaggggtgtttttctatgatgtgtctttttctcttaaaagcatctctaattaagtttagtccagtcaggataatctcccttttggtaaacacaaagtcaaaataacctaatttcatgagcaattaatttcctaccacagtaaatcacttttttttttttgagatggagtctcactctgtggtccaggctggagtgcagtggcatgatctcggctcactgcaaccttcacctcacaggttcaagtgattctcctgcctcagcctccagagtagctgggattgcaggtgccttccaccatgcttggctaattttgtattttcagtacagatggggtttcaccgtgttggccaggctggtctcgaactcctgacctcaggtgatccacctgtctctgcctcccaaagtgttgggattacaggcgtgagccaccgcgcccagccagtcacacttttttacactaaaaagataacaccgcaggtatgcaacagttgggaatcctggggatcatcttcgaattttgcttatccacctgaacagacttttcttttttttgagatggagtttcactcttgtcgcccaggttggagtgcaatagtgtgatattggctcactgcaacctccacctctcgggttcaagcgattctcctgcgtcagcctcctgagtagctgggattacaggcgcccacgaccacacccggcggttttgccacgttggccaggctggtctcgaactcctgacctcaggtgatccacccgcctgggcctcccaaactgctgggattacaggtgtgagccaccacacccagacctgaatagacttttcaaattctttcagttgcttttgttatctaagtaaacaaagatatctgcaaataatattaactacttcccaatttaattcattacaaatatcttttttctggcttaatttcttcatgtaccattttatagattcacacacacacatatataacaatgaaaatgtatccaattattctatttttgttaatttgtattataaatgagtattaaaataattcttttttgtttgaagggtttgtttgttattgtttttttttttttgagacagagtctcgccctgttccccaggctggaatgcagtggcgggatctcggctcactgcaacgtccacctcctgagttcaagcgattctcctgcctcagcctcctgggtagctgggattacaggcgcctgccaccacacccggctgacttttgggtttttagtagagacagggttacaccatgttggccaggctggtctcaacctcctgatctcaggtgatccacccacctcgccctcccaaagtgctgggattataggcgtgagccactgcgcccagcaacacagaactatttttataacatacaagtctttcaaccaataaatatttaaattatctcttaaaatgtggtacaaatacacaatggagtactattcagccttagaaaggggtaaatcctgtcatttgaaatatacatttgaagacattatgctagatggaataagcctgacacagaaagacaaatactgcataatctcatttatatgtagaatctaataaagtttaactcaaaaaaaatagaaagtgaaataatggttaccagaggcttgatgtggtgggaagaaattagagtttttgattgaagggtacaaagtttcaaatagacaaggtaagtagtttttgagatctattttacagcagcgtgactatagtaaaccacaatgtaattgtattttaaaatgactaagtaaatttcaaatgtcttaccacaaagaatgataggtaagcgagttgatagatgttatttaactcaactcaatcattccatattacatacatatattcaaatgtcacattttaccccataaattcattcaactttgatttgccaatcaaaaatactatccatactttaaagagaaataaactttaagaaatttgatgagaaaagtgttctttaaagagaaataaactttaagaaatttgatgagaaaagtgttcattttaaaatcttagaatacatacttttgcatatatatatatttcaaatggcttgctcctttaatgatgtaagtaaacttttttttttttttttgagacggagtctcactgtcacccaggctagagttcagtggcatggtctctcactgcaacctccgcctcccaggttcaagtgattctcctgcctcagcctcccgagtagctgtgattacaggcgcccgccatcatgcccagctaatttttgtaattttagtagaaactgggtttcaccatgttggccaggctgttcttgagctcctgacctcaggtgatccacctgcctcggcctcccaaagtgctgggtttacaggcatgagccaccgtgcccagccgtaagtaaacttttaatataatgaatagtctaaacccaacactcagaaataaaatgtttatttttaatgttcaaaatacaatactataaaagactctaaagcaactgcttacagtaccattatttctacgtttctaaataaattattccttcacttgttagttatttgaatatatattttaaactacatttcaacgtattaaatcaaatgaacatacgtacttggcaataaaaaatttattaaacaggtagacaagaaaacaacttgccttcttttctaattttaaaactgacaaacactcggcatttaggtgcttatttgtctagtgttactggagtgctaaagagaagtactcaatgggaaatctttccgtatttatatccatgctgggtgtgaatatatgggaattttccaagggtagtactataaacattcaactactattatatatagccccagattgactgattagaataaacatgggttacaaaccactgatgtggccaccttgtttttaggcttaacattgatcatgatctaacagaatcaacaaatgagagctatatgctgggtgctcttcgggcacctttatttgcattaattgctttaattttaccaaaatcctaaagttggggatgcaatcagtaaccagctgacaccgagtttcaatctaaccattacgcccaacaccctgtcacccaatgcttgttttaaatcctgacctaacattttggctttaaattttttaatttagtaaaaataaagataaatttacaaaccacttctttttatccatagatagtatgtagaacttaatttttggtttaaagtattcattacaaagtctgagacaaacacttcagtaagtgaattataacattattcctcttatgacttaaaagaaccattaattttacttttgaaataatgagtgtttatatttaaagttaaaatgagcctattattatatagaaaatttgttgtcagcatgaaccttgtcatccactgagtggtctacagttgctttcagaaacactaataagaatactgtttctgattgaataattaaagaatgttatgctttttcagtgactaaaataaaatagattgaaattactgattagtaacttaccatgtggtttaagtgttatttaataaatacatgtgaagtttctcttaaactcattttaacaaatgacttctgtttttcacttctattagaaaaaagtattaaaatttgttattacaagcctatcaattttattcagatctaaatatagcgctaatcttaaaagatctgtatgcttaggattataaaaagcctattctccattcacacatataagataaataactgcttttcagtaaacccaatggggcaactgtgactcacaattataagctattaaaatattaatactatcacctagatgacacttttaggtatctgcatgttcaagttgtttaacttataattcaaaaataattttttataaactataaaaaataaaaagaattttatttcttaaatattgtcattatttctagttgacttaacattcaattttagaggctgtggctttagaaacaagaaatgtcatggttgactccactttacttcctgccttatttcacacaaacacagcagcacaaaaaaggccagaaatgctacaacttgactggaaatacaccagtacctttctagggagaatatatgtgggagcatatttacttgaaattaatgacatcttttgttgaagtacaggcttctatatggcaagtaataaatacaaaaattttacagggcaaaagagtaagagatatactctaaaattaccttctaacccattatttcttttttcactagcatggttgtgacggaatgagcatttgcagcagctttttttttttttttttgagatagaatcttgctctgtcgaccagactggagtgcaatggcatgatctcagctcactgcaacctctgcctcccgggttcaagtgattcttctgcctcagcctcctgagtagctggattacaggcacgtgccaccacaccctgctaatttttgttatttttagtagagatgaggtttcaccatgttggtcaggctggtctcaaactcctgacctcgtgatctgcccgcctcggcctcccaaagtgctgggattacaggtgtgagccacggtgcccggcctgcagcacagtcttaaataacctacactctctgcttcatcatttttgagatatggccataagacatttatgattttattagaaaaaaatgtttcctttttctaattcagaaatttagcaaaatttcacaggtggatcatgaggtcaggagtttgagaccagcctgaccaacatggtgaaacctagtctctactaaaaatacaaaaattagccggatgtggtggcacgtgcctgtagtcccagctacttaggaggctgaggcagagtgcaattgtgccactgcactccagcctgagcagcagagagactccatctcaaaaaaaaaaaaaaaaaaaaagaaaattgaatctacaataactgtagtaattatactttgaaataaatttaaccaaaaagtggaaaaacctgtgcattataatctaaacaatattgaagtacaaaattaaataatacacaaatggaaaaatattacctataaatgaattagcattattattgttaaatatctgtattacacaaaataatctacagacataatgcaacctctatgaaaataccagtgacacactggtataaattttaaaacatacatctaaaatttatattgtaccacagaagacccaaagtagccaaagcaataaagaaaaaaaaaaagtgtgctttgggaggccaaggcgggtggatcacgaggtcaggagattgaaaccatcctgactaacacggtgaaaccccgtctctactaaaaatacaaaaatttatctgggcgtggtgtcgggcgcctgtagtcccagctactcgggcggctgaggcagaatggcgtgaacctgggaggcggagccgattgtgccactgcactccagcctgggagaaagtgcgaaacttcgtcttaaaacaaaaaaacaaagaacaaaacaaaaaagggtgaagatatcaccctacctgactttgaaatatactaaaaaagctatattagctaaaacagtatggtaattgaagaaaaacagacacatactccaatggagcaggaaccaaaaaaaagacaagaaacggctgatttgaagttacaactaagcccagcagtaatatttatggcttattacggagcatcagttacgcagcaaacactctcatgtttcttttttttttttttgagaaggagtctcgctttgtcacccaggctggaatgcggtggagccatctcagctcactgcaacctccgcctcctgggattaagcaattctcctgctgcagcctcccgaatagctgagatttcaggcacgtgtcaccacacagctaatttttgtatttttagtagagatggggttgtgccatgtttgccaggctggtcttgaactcctgacctcaggtgatctgcccaccttggcctcccaaagtgcagggattacaagcatgagccaccatacctggcctcactgccatgtttcttttgatacatttatatatataaacattctcatgacttatgaaacttccctagtacttacctaaaaaaaaaaaaagactcaataaataagtaaattcacttatgtcatctataaaaagtaaaaggacaataactaaagaaaagtaggcttatataggcatctgcaactaaaagaacaaaatggaatgttctaaataaaatacattaattatggaattacttctaaaaattatgtgcactactgaattttataaaaaacattcttataatcacgaccaactcatgtaatggatacttcataaactataaaacaaaaaattataacaagaaaattataggtctggcatgagtgccaggcaaagagtttgtatggcgagattctgaaccttaagccataaggttttacagtaatgaatttaatacaaagctgagagcataaatttgctttcagcatttttgaggtttttactagctagcaaattaatcaccttattaaaatgatttgttccgatattgctctattcttctgaaaataggtacaaactcatgctcatacaaacacactcactccataattttctttcctaaggtttagagtaatacatgcatatttttaactttatgtaaatcaaaattaaaagtctgtgtgtttgcaggcagagaggccacatgttcaaataaaaatatataagaaatttattaaaatacgtattcaagactcacaaatgtatgcattttattcatacttctaaataatataatcatagaaattaccctgtagtcaatgtctatttatttattcattttgagacaaagtctcgctctgccacccaggctggagtgcagtggcacgatctcagctcaccacaacctccacctcccaagttcaagagattctcctgcctcagactcctgagtaactgggattacaggcactcaccaccgtgcctggctaacttttctatttatagtacagacactgtttcaacatgttggcaacgctggtcttgaactcctgacctcaggtgatccacctgtctcagcctcccaaagtgctaggattactgacatgagccacggtgtccggccgtcagtaacagtttagttgtacattttaaactaacaaaaagtgtaaaattaaattttctgtaatacaaaggataaatgctagaggtgaggcagtcagtaacagtttagtcgtacattttaaagtaacaaaaagtgtaaaattaaattttctgtaatacaaaggataaatgctagaggtgatagatacctaatttaccatgaggtgattattatatattgtatgtatgtatcaaaatatgccatatgtggtttaaatatatacacatactatgtacccaaaaatattaagtaaatttaaatgagaaagaaaaaataaaaacttaacatacaggaacaacattctttaacttctttgcagtttaaagccactagcaaaaaagattactacaaatactactttattatgttaacaaataatatattgttaccatcttttacctacactctaaggtggaatgggttaaggttagcggcaaaataatgcttcattgaatgcacaatagtatttaacgtgttaaaaacgttaaattaaaaagttaagtctacacataatttcaaagttttaaaatgtactggattgtatcacataaaagtacaattagtaaaataatacactattaaattttaactaaaattaaaaatatttttctctcataatgtagagtattaaactgaacacctacttcatgcattgctcaatattataagttaatcacaaagagcatccctacttagattttcatcatacatcttacattttaatgtctttactctttcatagaagagagaatatataacgcccacctaataaaaaagaatctctcatatctttcatgcaggaacaattcatcacatactttcacatgtgaatacaataggaataaagaaacagcatgaatttgagagttgaattacatcattattcacgtatttaaaaagtctataaaattttttcaagaaaaaagtatactttggtggacacagtggctcacgcctgtaatcccagcactttgggaggctgagccaggtggatcacctgaggtcaggggttcaagacaacctgcccaatggccaagaccccatctctactaaaaatacaaaaattagccaggcatggtagctcatgcctgtcatcccagctacttgggaggctgaagcaggagagtcacttgaactgggaggcggaggctgcactccaacctgggtgacagagcaagactttgtctaaaaaaaaaaaaaaaaaaaaaaaaaacaaaagtaaagcctgaccaacatggtgaaaccgtctctactaaaaatactaaaaattagcaaggcatggtggtgcacgcctgtaatcccagctactcagaaggctgaggcaggagaatcacctgaacctgggaggtggaggttgcagtgagccgagatagcaccactgcactccatcctgcacgatgggaacaagactccatctcaaaaaaaaaaaaaaatgtaatttgaatgtaataactctccaaaatatcttatacactttttaaagttatatacaaaatatttatgtacaaacttcagttctcaattattttctaaactcagccctctgatttagtgtactgtctgaagtgtcagttccttagatatacctactctgaattgacatttacagacttaattttttcaaataattttttatattactgcatctgcaaaaacatattttagtatgaactctctggtgtttcctaggctgtagtttgtaaaaaaatgtttttccaaatttactacctttgcagagattttcttcaagataaattatctgatgttgaagaaagctggagcaactacttcagggttttcctctagaacaaaatgtgtaaaataagatctgtaatacaagtaatggtaccacaacactcttcatattagtttttttttttctttgagatggagtgcagctggagtgcccaggctggagtgtggtggcacaaactcagctcactgcaacctctgcctcccaggttcaagcgattctcctgtctcaaccaccgagtagctgggattagtcatgcactaccacacccacctaatttttgtattttgggtagagatggagtttcaccatgttggccaggctggtcttgaacttctgacctcaagtaaaccacctgccttggcctccaaagtgctgaaattacaggcctgagccaccatgcccagcttacactcttgatattttaatgcttgtcttcaaaataaatactcttcttcactttaaaggcttatattttctgaaaaatctattgacagtaatttcatctttaatgcttctattaagtatgaactctctgatattgaataagatgtgaacagatattaatggcttcttcacattctttacatttgcataatttttctcaagtatacatcatttcctgtccaataaagtgtcagcattggttaaaagttttgccacattcttcacacttgtagaggtttcctctactatattttacctacaatcaagtatgacaaccatttaaaggtgtttagaaatattgaggtgttgtcaactgcactgttatatctttcaggtttgtacggtttctctccagtaattctcttcgttggccaggatggtctcaatctcttgatcttgtgatccacccgccttggcctcccaaagtgctgggattacaggtgtgagccaccacgcctggtccatttttcttatttgtcagatttttctacagcatgaattttcttgtgtgtagtaaggtttgagcattggttaaaagctttgccacattctttacatttgtagggtttctctccagtatgaattaccttatgtttagtcagagttgaggaccaattaaaggctttgccacattcttcacatttgtagggtttctctccagtatgaattatcttatgttgagtaaggtttgagtattggtaaaaagctttgccacattcttcacatttgtagggtttctctccagcatgaattatcttatgtctagcaagtgtcgaggattggttaaaagctttgccacattctttacatttgtagggtttctctccagtatgaattttcttatgtgttgtaaggtgtgaggataggttaaaagctttgccacattcttcacatttgtagggtttctctccagtatgaattatcctatgttcagtaaggtttgaggaccgcttaaaagctttgccacattctttacatttgtagggtttctctccagtatgaattatcttatgtgtagtaagttgtgagaactggttaaaggctttgccacattcttcacatttgtagggtttctctccggtatgaattcttttatgtgtggtgaggtgtgaggatgtgttaaaggctttgccacattcttcacatttgtatggtttttctccagtatgaattctcttatgttgagtaagagttgaggacacgttaaaggctttgccacactcttcacatttgtaaggtttctctccagtatgaattctcttatgttgagtaagggttgaggacacattaaaggctttgccacattcttcacatttataaggtttatcaccagtatgaattctcttatgtttagtaaggttcgaggattggttaaaagctctgccacaatgttcacatatgtagggcttctctccagcatgaattatcttatgtctagtaagggttgatgattggttaaaagctttgccacattctttacatttgtaggcattctctccagtatgaattatcttatgtgtagtaaggtgtgaggatatgttaaaagcttttccacattcttcacgtttgtaggatttctctccagtatgaattatcttatgtgtgttaaggtgtgaggacttgttaaaggctatgccacattcttcacatttgtagtgtttttgtcctgtatgaattctcttatgttgagaaagggttgaggacacattaaaggccttgccacattcttcaagtttgtaggaattgacagtagtgtgaattcttttatgttgagttaggtgtgaaagaacacaaaatgacttgccacattctttacatttgaaaggattcttttcagtcttatgtctatttgaatttgaaaatttatgaaagtctttcacatatttatcacactgaaatattttgctctgggtagttgtcaaacactggttaaatccattataacttcctttgtgcaccttgtactcatccacacttttatagcctttttttaactgtaaattgtgatgtccacatttttcatattttctcagtattattctttgcaaagaagcttttatgctctgctctggccgaaggtcttgggcaaaataacaacacatacctgaaagaaataaaaataacaacttactccacatactagactcagatacatattctttacacatctaacctacaaaactatacaaactacataaacaagattgcataagaaggccaggcatggtagctaatgcctgtactcccagcacgttgaaaggctgagatgggcagatcacctgaagtcaggagtttgagaccagtctggccaactggtgagacccatctttactaaaaaatacaaaaaaattagccgggcatgatagcatgcacctgtaatcccagctactcaggaggctgaggcagaagaatcgcttgaacctgagcggcagaagttgcagtgagctgatatcacaccaaggcactccacgctggagaacagagcaagactttgactcaaaaaacaaacaaacaaacaaaaaactgcataacaaaataccaaagaccctaatttccttatagacatataaatataagaaaaatacacagaccaaaatacatttgtgaaaaatttataaatgagttaagtgtgtacagtgccccaggaggtgagtacaatgcaaagagccacaaagaaaaagagaaaagtctgttatatttacctaacacagctcatccctctccccaatataatatagtgcctttagaagtgaacacccagccaggcagggtggctcaggcctgtaatcccaacactttggcgtgccgggtgggccgatcacctgaggtcaggagtttggaaccaccccggccaatatggcgaaaccccgtctctactaaaaacacaaaaattagccaggtgtggtggtgggcacctgtagtcccagctacttgggaggctaaggcaggagaatcgcttgaacctgggaggcagatgttgcagtgagccgagatcacaccactgcactccagcctgggcaacagagcaagactccgtctcaaacaaaaaaacaaacaaacaacaacaacaaaaaaaaaaccccaccaaatctgttgacaatgctatgaaaatgaaacttatgttgattgttgatggaaaccaaggatgcagccattattttaaaatgttatgtttcacacataattaaaaatagaattataattaaatacagcaatcccatttattaatctatatccaaagtatgcaacacaggacctagaagagatatgtaaacatctatctttattgtaccagcattcacaaaagccaaaaggctgaagtaacccagatgtcttttgattcataaacgtatcaaaaaatgtgacatatacatacaatggaattttattcagccttaaaaaaatcgtggccgtgcatagtggctcacatttgtaatcctagcactttgggaggcagaagcgggtggatcacctgaggtcaggagttccagaccagcccgggcaacatggtgaaaccccatttctataggatacaaaaaaatttatccgggcatgatggtgggtgcctgtattccccactactcaggaggctgaggtggcagaattgcctgaacctgggaggcggaggttccaatgagccgagatagcaccattgcactccagcctgggcaacaaagcaagactccgtctcaaaaaacaaaaaacaaacaaaaaccacttgtaaaattctaagataaactttgagaatattttatcacctaaaataagacagtaacagaatgatgcatactatatgattccacttatatgagatatgttataaagagtcacactcataaaaacaaagtagaagagtgtttgtcaagggctgaggagaggggaaaatgggcagttgttacttaatggatattgagttttcattttacagatgaaaaatttctagaagtgttttgcataaccaggtgaatatactgtcacccaagctgaaatacagtggcaagattatggcttactgtagcctcaaactcccagcctcaagtaatcctaccccttcaattccccaagctgctaggaccacaggcgcaccccaccccatgcctggttatttttgaaaaaaattttctagagagagggtctttttttttttttttttttgagatggagtctcgctctgtcccccaggctggagtgcagtggctgaatctcggctcactgcaagctctacctcctgggttcacgccattctcctgcctcagcctcccaaaaagctgggactacaggcgccctccaccatgccaggctagttttttgtatttttagtagagacaaggtttcactgtgttagccacaatggtctcgacctcctgacctcgtgatctgcccacctcggcctcccaaagtgctgggattacaggcgtgagccaccacgcccagcccgagagagggtctttacgggtgggccaggcttgtctcaaacttttgggctaaagtgattctcttgtcttggcctctcaaaatcctggaattacagatgtgagccaccaccatgcatagtcctaatatgtacacttaaatagatttaagatggtaaattttatgtcatctgtttttacaacaattttgtagaagaagaaccgaaaaaagtaaagaattatgaatcttttcaaaaattaacttcaaataacaaaagtgatctgaaaggaacacaaaggaaatgtacattcattattaaacacagtgtagaaataagattattttcacaactactcacttatataagacaaaacaaccactgaaaacagctaagaaaaaatatatacaagataggccataaccataattagggtcatatttataaataaaaaacacacacatatataatctgattgtgatagacatatagctcatttatttcttaattaagccctatgttgacttaaagtgtacagagttacaaattgtctaaaattttaatatgtaagtaaaaccaaaaacacaatagattcattttaagaaaccaacactaaaaaaaacacataaagaactgcaaaataataagggaaatgtttactcaaactctggtaagcaacattaatggaccattaaaaaagaatttgtctagataactacaatatttgactgtaactgtgtactcatggaaggcaggtattatgaatcactggcattaactatatggtagttaaaatttcagagaaaatgcagtataaccataaatagaagactctaatgagaaacttttaataaataagcattataaaaactagaggtagttttcatgttttaaatgtatgttattcttatacaaaatgaaactgctgtaattcaaatttagaagcaggccaggcgtggtggctcacgcctgtaatcccagcactttgggaggccaaggcaggtggatcacttgaggtcaggagttcgagaccagcctggccaacatgatgaaaccccatctctactaaaaatacaaaaaactagccaggcgtggtggtgcatgtctgtaatcccagctacttgggaggctgaggcagaagaatcacttgaacccaggaggtggaggttgcagtgagccgagatcatgccattgcactccagcctgggcaacagagtgaggctccatctcaaaaaaaaaaaaaaacaaaaaaaaacaagttaaattatattgctaaattaaaaagaaataaatatatttttgcagaatataattaaagcctctgatatataaaacaaatatttgggaataaattatgtttttatttagatatagtctgaagaaagtgggtgcaaatcctgtaattcctatttgcctgcagcaaacaaatgtataagtaactattttagtaaatatggagtgcctactaagtatctaatttacttcaggcataacatttaaattctgacatatgtgtcaatctaaaattaattctgacatatgtgtcaatctaaaattacagacaaatttgaaatagaaaatagaaaaatgaatagagtgacattagtttgacggaaaaataaaaggtgacctattttcttaacccgacagcaagaaaatttgtcaggaattcctgacaaaaatgcctttatgagagagccaagcatcatgtctcacacctgtaatgacagctatatggtacactgaggttggagaatttcttcaggccaaaatttcaagaccagcttggggtatatagcaagtcctcatctccaaaataagtgcctttaagagagctttaaaggccgagtgtggtggctcacgcctgtaattccagcactttgggaggctgagacaggtgggtcacctgaggtcaggagttcgagaccagcctggccaacatggtgaaacactttccctactaaaaatacaaaaattagccaggcgtggtggcgcatgcctgtaatcccagctactcgggaggctgagacagcagaattgatcgaacccagccgggaggcagaggttgcagtgagccaagatcgggccactgcactccagcctgggtgacagagatgagacttcgtctcaaaaaaaaaaaaaaaggctgggcgcagtggcttatgcctgtaatctcagcactttgggggactgaggcgggtgtcgatcatctgaggtcaaggaattcgagaccagcctggccaacatggcgaaaccctgtctctactaaaaatacaaaaattatccaggcatggccgggcacgatggctcacacctgtaatcccagcactttgggaggctaaggcgggaggatcacctgaggtcaggagtttgagaccagctggccaacatcgtgaaaccccgtctctactaaaaatacaaaaattagccaggtgtggtagcatgtaccagctgcttgggaggctgaggcaggagaatcgcttgaacctgggaggaggacgttgcagtgagctgcgattgagccactgcactccagcctgggcgacagagcgagactccaagccccacttccaaaaaaaaaaaaaaaaattttccgggcatggtggcgcgtgcttataatcccagctactggggggctgaggtaggaggatcacctgaacctgggaggcggaggttacagtgagttgagatggtgccactgcactccagtctgaggaacagagtgagactccgtctcaaaagaaaaaaaaaaagagagattgagagagagagctttgagatccagggagggagttgtgaaactctgataatgcccaagactgaggagcatccttttcagaaggcaggcattcattcaggtggtaaactacaggacctctgttcttggctacagactgaaaaatagcctacccaacttggtcccactgagaatactgaacttaccccgtaaccatctcaaactcctcccagtcacagtctgggagaggtcctgcccttccagaggcctggaggaagacacccatttatagccatgcaggcaggtttgcaagaccttagcctttactgtggtccctgaagcagttccatgactcagttcaaggccagttctgcctacacagaaacctacacagtgacctggcaaaatcctctttgatactaagtgaaagccatactcattcacatcctgatgtaaggctcaccatatgcagacctgactacagaaacctgcctagtgtctgccctacagatcaaagtcctgaaggatattcagcctgtccaaaaataaaatgcaaattacaactacacaatccccttgtaacaaggcaactaaaggtaaacccttgtgcagacatagcagccttgtgagcaacctacaacccctcttcattacaaacccatagggcatcccattatcctgggtgcccaacaaaagatcttttacctcctgtaaccagtttataaaaacttgaagaggtgtttgtttcttgaaattcacagacaccagtgcaaaactatattgtgcccagtgtcaatgcttctattttaaaatagcactggaagtatgtagcagaataattagaacaacttttaaaaagccattaaaattgaagacaaataggtaaaaagttgctgtttgtagatcatataatctcatatataaaaaatcatacacagtacatttaaacaggtctaaactaattaatatactcagtaaattagcaaaatataaaattaacatacatttataagatacggttccataaacttaaactatctgataaaataaaggaggaaaacaatcttattgataatagcattaaaataataaatttcttagaacaaatttaaccaaggatctaaaaagcctttacaataaatgatgtatcaatggaggaaattagaaaagacacaaattttaaaatattttgtgtgtatggattgaaagaataaatattgttaaagtgccatattatccaaagtgatctacagatttaataaactccctatcaaaattccagtggtatttgttttcatagtaatgaaaaacacaatcataaaatttacttgaaacttcaataaactctgaataatgaaagcaatcttgaggaaaaagaacaaaggatgaggacaacgtactttataatttcaaactatatttcaagactatagtataaaaacaggaaggaatgtgcagaaaaaatgaacaaaaaaaatgaaacagaaaccactactctcacatatttcagacatgatgtagaaagaaaacttaatagtttaacacagagtttcttaaaatttcacagatatttatgtgtccaccaaaacattaaaaaagcagattttgtagtcttgtatatgccaaaaaggggactttggttctcactgaaaacttgaagaaagataacggaagggaaagtatattccttagaaaagttagaaggataagacaaaagatacccctatgtaagagaaaaaataaaataaactattttattttcccagaaactattttccttggagcacaactcccaaattgtatttcttatttttattcgtttatttatttatttatctgagacggagtttcgctcttgttgcccaggctgcagtgcaatggcgcgatctcagctcaccacaacctctgcctcccaggttcaagcgattctcctgcctcagcctcccaagtagctgggactacaggcatgcgccaccacacccagctaattttgtatttttagtaaagacggggtttctccatgttggtcaggctggtctcgaacacccgaccttaggtcatctgcccgccttagcctctccaagtgctgggattacaggcatgagccaccacacctggccccaaatcgtatttcaaaaactgactttctccttgacatttggacctctcatctgtgtcatctgtcatattcactctcacctacctgggggtttggccaccatctcatgtctctccatattccagggctctttgccttgctccagacaggtgatcaggtctggcttagagacagcaatacctgttttattaaaaataaataacatgaatgttgctcatattctttaaataatgtgctcagtaaaaagggtgtaattaatagaatactaaattaattacaaaatacaaatttaaaacaaatttctaaatatttagacactattttaaatttgtaggtccttaattttactacttagtagtactgaatcaaaaactggagatgacaattagattttaaggtatagaaaacaatattttatgccactaaatttctggaattaccactaatttagagtgaaggatacagatcagctcaggaatataaaaagtccagatcacaatgaaacatcttgaatttttttttttctacattgacaaatccccaagattttctttctctccctttttttttgagatggagtctcactctgccacccaggctggagtacagtggtacgatctcggctcactgcaacctccatctcccgggttcaagtgattctcctgcctcagcctcccaagtagctgggactacaggcgtgcaccactacacctggctaatttttttatttttttaagtagaggtggggtttcaccatgttggccaggctggtcttgaactcctgacctcaggtgatccacccgccttggccacccaaagtgctaggattacaggcataagccaccacgcttggcccccaagattttcttagaaatagagatctgatactcatttatgcaaagatcaattaccaaaaaacatcctacaaaaaaacaaacgaaatatttagggtagattaggaattgtgtattgaagttattctcacccaggaagaccaggtttctgtagttctctaacatcacgttcctatataaattctgctgtgcagtgtccaggcattgccactcctccacagagaattctatggccacatccataaatgtcaatggtccctgaaaagtacacacacacatatttacgaagtggccatgggcaaaatttttaatttgattcaagttgaaatgaaagactaaggagtactcattctgacttataaaagtgaatgaaattatccaaatgaagtaattttaaagacagaaatattctctgatgtactctctaactctgagaaaagactagaataagatccacaacatcaatttatatatgatacttttctggataataaaatataaaattaaggacatgaacacaggcatgtacattctggagtgctatattcacactataaagaatgagttctgttgagatgaaagacatgtcgagttacaaggtacatctcaaattttaatgtgtacaataaactggaaatcttgttatgctttttttttttttgcagaagatctggaataaagtctgagttgctgaatttttaataagctcacaagtaatgccaatgattttgccccaaagaaaaatattttatcaaacatccaacaagtgaaataacctgtttttccccccagtttttatggcctataagagagagatgacagccttcattttccaaaaacagatatatgcaaagaaaccctaagaaagaagagcagctgtcagattacatttgataatttatacaaatcagctgcacaaagatacttaataatgaagaaaaaataattaactgtatagtgaaaaaatctgtcagacagctctttaaccaagtgaatcattagcctcaactgcactaggacaaatttttacggtgtgctaaaacacacagaaggacacacagcatcactgctggaatattgttcccaataagtaaattatagtctaaattcaaccatatggaaacatcagttttatgcaaagttcaagatacaggtatcttctatcttgatacaggatatcttaagatacaggaatcttctattcaagatacctgtatcttctatgttctgtaatttttaatagtgattttaagtagtctttctttagcaccctagagaacaggtatctcctgataatttttttcagaactttctgagtaataaatgccatcctgtttaaataagcattttcttaattcggttctgcatagggctaatagcaaacacaaatggaacttcaacattacatgttctccatctttactaaggatcccagcttttccccaatagtaatcttgagtatccacacttttctaagttcaacagccacaaaaagaacacttttaatactgcagatcataaattaatggtgataattttgcaaggcatataaaaagccaaaatgtaaaaaatttagagaaggctctggtatataggaaagaaatatttttcttgattatcataagaattttaaaaagtagttaaaacaaactcattagggagaaaaaaacacaagtatagaagtcaaggtttgcaagtactaaacacacagcattccggaggcagggcggatacagctcttgatccgagacatgtttagctgaaaaaaaaaaaaatgccactttttcctctatctcctccttctcttggatttattttcagatgagattttctggacaaattacacctgcatcttgagaaaatgccacctgtttacatgctacgaccacacccacaggcagaaggaccaagaccctcagaaaaagtccacccatttctgggtgaatcttcagaaaagattcagaaacaatgaagagaaaaatagaagtttctcctttcctgtccttaggtaccctccccaccaaagacaccagcaatttctgctacaataatggaaatatgggccacgctgccctgtctttaccaaacccaaacagaacaggccctgtgaccatccttcagtggaaaagtaaaacttaactctcatgaatgtatcttgaacccctcatagttgattctggccttaccttagagtcacatgaggcacttaattaaaacaacataaatgtgtccacacaaaacaataaacagaacctgtgaagaaggcacaagtaaagggatttctaataattagccatgtaatttgagtgcctacacctaagtaatccaagttacttagaatggcaaaaacgtcaattaacttttccaccaacctaatagaagtccagctgataaccatttagctaagcattgccttgcaattttttttttttttagacggtgttttgctcttgtcatccaggctggagtgcaatggcacaatctctgctcaccacaacctccacctcctgggttaaagagattctccagcctcagcctcccaagtagctgagattacaggcatctgccaccatgcccagctaatttttgtacttttagtagagacgggattttaccatgttggacaggctgctctggaactcctgacatcaggtgatccacccacctcggtctcccaaagtgctgggattacaggcataagccaccacgcccagctgccttgtaatatttaataagcttataaatcacttggtaactttggaccttccctatgtattttgattctgcaggttttcaaagggttcatgaatgtgcgttttaaataagtcccctgtcaatgctgatgttgcttcttctaggctcatcattagaattggttagagaagcaggcacagtacagagtcccttacactcagcactcttgtcacaacacaaatacttccggcacaaatgaagacaacaaatctccatctttaagtatcatattctttgctggttctttaaagtttacagaggcaacagaaagtagcaatgcctgaataagtctgcacttcgaaaacaacatgtactattgaaatgtttataaagcaggtactatgtgctcaagagtatgttacagagcactgtgcttggaataacacattatgtgatttaattctcataacaaactgggagtcagcacagctgtttaataattcccaggatttagattaaggcttagcatttttatttcatcttctgtttctctgtccttggtttttttaaaaaatgtatagaacactaaatatagacagatgacagggatacagaaaggaagaatttaatgtagtttaaagaaatttttattgtgttcatatttacttgtttgtgacttgtggagcaactactggatctgcagaatagaaaacaagttgctaaatgtccctgcaagcactggtttaatagaaaatttaaaaattaagatgctaaaatacatactttatttttccaattttatctgcttttgggtttcagaaaattgtgagcaccagctctaaaaatttaacagactcactagtcaaaacttccaatcagttctgtgaggccagacttcaaggtggggccagaccgaaataagaagtaaaatagctgattgctaccctgtgaagtttgtagaaatctgaagtgactggaagcctgagaggaaaaggcccctctagagtaaagtttggctggaaccatatgtgttcatatcacctctagtaattctagacagtgtttggaaaatataattaaaagaaaaaatttctccagccctagagaaactccaaaatgatagaacagaaagtaaactgtttcattacacaattaaaccagaatgtgacatgcatcacagtcaatcttcttaagagattgcaaagacaaaaagacactcccataattagtccacaagtaaaagaatttatagcaccatgtaatacatggttcatcctaaattcacctggtaatgggggaggtgatccatgtatgctaattggttataatcaatgacaaaattaacttttcacatcctcatgacaggaggtaattttgcaacttagggagttatctttttggctatttacattttaagcaatcaatggctctgtactccctgagcactatactctgcttgccctttcctgatagccagtgtcctttcttgactcctaccacagggctcacagctggcagctcacatcttacacgaaccccaactgccagagcagcactccagtcccacatcaggtaatgaagcctgagccagccctcctggctgaaattgcaccttcacgataatgggaatgggagcagtgtttcagcttcagtttctatttataatagtgacatgaaaaaaatactgctggattttcagcatcagtccgcatagagatacctctaagagttctccctgtgacagcccaactcattcatgacaccatgggatagtaatagagcttctgaaacagacacccaaagcattggagagaaaaatcgctcttcatcttagtaaaattatactcagtaaaaaagaagaacatcttaaaaaaacactcagattagatataagattgatcatgttggccagaaaatgttcccctaaaataaacgtctctctaaacacccaaactgcacagctactctcagcatgagaagcatgagcattatgaagaaaggggacatattctcagcaaaattttataaagtttctcttttatctctgttgctctctcgtctcctagccattaaatggaggatttatattggaatacatctgacaatttccaacagctcctttttatttttattttttttttgagacagagtcttgctttctcacatatgctggagtgcagtggcatgaccttagctcactgcaatctccaccttccaagtttaagcgattctccttcctcagtctcctgagtagctagaattacaggcacccaccaccaccccccgctaatttttgtatttttagtagagacagggtttcaccatattagccaggctggtctcaaactcctgacctcaagtgatctgtccaccttggcctcccaaagtgctgggattacagaggtgagccacagcacccagccttcaccaacgttttttgatgaagaatcagaatctgactttgtttatatagtaaaatatatttgagcttacaacacagctaacttaaaagctattatatttcttgcatggtcacatcacccatcacatttatttgtactgtaatagcagtattcgagtttagtaaaataaaagatactgaaatcatgcttacctatatctattgggtaaattaatatgcatgtcaggctaatatctactgtaacaattttgtagtgaatttttttggatattagatataaatatctaagcataaataattttaatgtactagtaataatgtagaattttaaaaaattttctgtaaccataatttagttataatactttatatttcaaaagtatgacgaatattaaaatgactaagacattcatccaaaataaatattgtggtcttatattcataatattgtagaaaataccgtataatttaggtcgggcgcagtggctcatgcccgtaatcccagctactcagccgagatcacgccactgcactccagcatgggcaacagagcaagaacccgtcttaaaaaaaaaaaaaaaagaaaatactgtataattcacacaaatgcaagttgtctacaaacactacacataaccatgctaattgttttgaagcagtaaataggaaccaaagcataaccaaagactccactgttgagtttatacactgaactgttctttcttttgcagtgtaagtacttcagcctgcaaatattggataattacactggataatcagttttttgtcaaagaaacttcctctgcatcttttagtctttatcattctgtattgctaagtttaatcctatctttgtgctccactttttgtgtgctcttaaaatgagctttaatctagacaaatctgtatctactttaagagactgaaaacaacaacaacaacaacaacaaaaccttgtaatcccagcactttgggaggccgaggtgggcggatcacgaggtcaggagatggagaccatcctggctaacacggtgaaaccccatctctactaaaaatacaaaaaattagccgcatgtggtggtgggcgcctgtagtaccagctgcttgggaggctgaggcaggagaatggcgtgaacccgggaggcagagcttgcaatgagcccagatcacgccaatgcactccagcctggaagcgagactccacctcaaaaaacaaaaaacaaaaaaacctttgccaaagcaaaaacactgcaatggttctgaggtcctagataaagacaatcctgagtcagaaagaatgacaaaaggtttctttagctgtaaatatgatttacatatatttcagaaaagcagagaatatctacatataagcaaaatgcttcaataaagagagatgaacaaaatatcctccctttttataaggtaagaaaataaagactcttatttctaatttatattttctcctataaaagccaaatctcgaccaggcatggtagctcatgcctgtaatctctgcactctacgaggccgaggtggttagatcacttgaggtcagaagaccagcctggccatcatggcgaaaccctgtctctactaaaaataaaaaattagccgggcgtggtggcatgcacctgtaatcccactactcaggaggctgaggcagaagaatcacttgaacccaggaggcagaggttgcagtgagctgagatcgtgccactgcactccagcctgggcgtcagagtgagactccatctcaaaaaacaaaaacagctaaatctctggacaagttcttgatctcttggacatctgaatttcagcagactgtaggttcaggcatctaaggagtagccttgggcacactaaagaaaaaagcagaagagagaaaggtgttctaaaaaaatccatgagtgcatatgaataaagcaagttcttacggagagctatgaagagagttggattctgacacaataatagtgggagactacaacaccccacagacactattacatcattgaagcaaaaaaattaacaaagatatcaggacctaaactcaacatttgaccaaatagtcctaactggcatctatagaactgtccaactgaaatcaacatagtatacattcttctcatcaccacgtcacatactctaaaattgaccacacaatcagaaataaaacaatcctcagcaaattcaattttcccaaagtcataccaaacacacacttaggccacagctttgtaacgatataattcaatacaaagaaaaccacttcaaattatccaattacatggaaatttaaaaaccttcacctgaatgacttttgggtaaataataaaattaagcagaaatcaataagttctttgaaacaaataagaagaacaaagatacacaaaccagaatcgctacaacacagccaaggcagtgttaagaaggaaatttatagcactaactactcacatcaaaaacttagaaatcaatttaaatacctaactctactaaaaatacaaaaattagccagtcatgggggcactcgcctgtaatctcagctactcgggaggctgaggcaggagaatcccttgaacccaggagacagaggttgcagcgagccaagattgttccattgtactccaggctaggcaacgcagcgagactgtttcaatcaatcaataaagcaagagaaaaccaattcccaagctagcagaagacaagaaataaccaaaattagatctgaactgaaggagatttagaaatgaaaagtcatagaaaatatcaagtaatccaggagttaaatatttgaaaaaaattaagaagataaaccgctagcaagattagcaaagaaagaagatccaaataagcacaattaaaaatgacaacagggggccaggtgccgtgactcatgcctgtaatcctagcactttggaaggccaaggaaggtggatcacctgaggtcaggagtttgagaccaaccagcctggtcaacatggtgaaaccccctctgtactaaaaatacaaaaattacccaggcgaggtggtgcatgcctgtagtcccacctacctgggaggctgaggcaagccaattacttgaacgcaggaggtggaggctgcctgggcaacagagcgagactctgtcaaaaaaaaaaaaaaaaaaagataaggacaaaacccaaaaaggatgaaaactgagaatggcactaaggcccagagttttggtcgcactctgaccaaaaaatgagaatggcactaaggcccagagttttggtcgcactctgaccaaaaaaggagacagttttaaacaaaattattggacgacattattctggactgagcttgtgcactaggtccaaacagacaaacctaaccaaaatggagtcactgatgcttaaatgtgacataatggaactgaacatttaaggaaagtggtagatgctaaaacaggccaggttttgtctgtcttttgtaaacagcagatttaagcacataattgcttaaaccaggaaggcgaaggttgcggtaatctgagatcattccaccgcactccagcctaggtgacagagtggattccacctaaaaaaaaaaaaaaaaaaaaaatggcaacagaggccaagcacagtggttcatgcctgtaatcccagcactttgggaggccgaggcaggtggatcacctgaggtcaggagttcaaaaccagcctgaccaacatggtgaaaccctgtatctactaaaaatacaaaaattaggccaggtgtggcggcatatgcctgtaatcccagctacttgaaaggctgaggtaggaaaattgcttaaaccccggaggcagaggttgcagtgagccaagatcacgccagtgcactccaacctgggcaacagagcaagactccatctcaacaacaacaacaacaacaacaaaaaaaaaagactacagagacattacctctgaccccacaaaaatacaaatagctattgaagtttactatagacacctctgtacacaaaaactagaaaatctaaaggaagtggataaatttctagacaaacaaattctctcaagaccaaacaagttgaagccctaaatagatcaataacaagctccaaaattaagttagtagtaaataggctaccaactaaaaaaacccaagaccagaaggttcacagctgaattctaccaagtataaaaagaaaagctgatataatgccttttaaaactattacaaaaaattaagaagggacttctccccagctcattatataatagcatcattctgataccaaaacctggcagagacaaaacaacccagaagaaaacctcaggctaatatccttgatgaacattgctgcaaaaatcctcaacaaaatatgggcaaaccaaatccagcagcacatcaaaaagctaatctactataaccaagtaggctttatcgctggaatgcaaggttggttcaacatacaaaaatatcaataaatctgattcacataaacagaactaaagaaccacaaaattatctcaatagatgcagaaaaaacttccaataaaatgtaacattgttcatgcataaaaccctcaacaaactaagcattgaagatacatacttcaaaataatgagttatctatgacaaatccaaagccaacatactaaatggacacaagctggaagcattccttctgaaaactggcacaagataaggatgccttttcttaccgctcttattcaacagagaattggaagtcctggctagagaaatcaggcaagagaaagaaagaaaatgcacccaaacaggaagggaggaaatcaaactatccctgttttcagatgacatgattcagtatctagaaaaccctagttttggcagaaatgctctataaactgacaacttctgcaaagtttcaaaatacaaaacaaaggtgcagaaataagtagcacctctatacatcaacatacaagccaaaagccaaatcaaaaacacaatcacattcaaaaatgccacaaaaagaataaggtatctaggaatacagctaaccagggaagtgaaagatctctacgacaacaattacaaaacactgctcaaagaagtcagagatgacacaaacaaatgcaaactatttgatggtcatggacagagaagatcaatatcattaaaatggccatactgaccaggcatgatgactcacgcctataatcccagaactttgggaggctgaggcaggcagattgcctgagctcaggagtttgagaccagtcaggacaacataaagaaacccaatttctacaaaaaaaatactaaaagaaaaattagctgggcacggtggcgtgtaatcccagcactttgggaggctgagtcgggtggatcacgaggtcaggagtttgagaccagcctggccaacatggtgaaaccccctctctactaaaaacacaaaaattagctgggcttggtggcacgtacctgtaatcccagctacttgggaggctgaggcaggagaatcacttgaacccagaaggcagaggttgcagtgagccaagatcacgccattgcactccagcctgggtgacagagcgagactccgtctgaaaaaagaaaaagtaataataataataataataataataatacaggccgggcgtggtggctcacacctgtaatcccagcactttgggaggctgaagcgggtggatcatctgaggtcaggagtttgagaccagcctgaccaacatgatgaaactccagctctactaaaaatacaaaattagccaggtgtggtggcacatgcctgtaatctcagctactagggaggctgaggcaggagaatagcttgaactcggaaggcggaagttgcagtgagccaagatcgtgccattgcactccagcctgggcaacaagagcaaaactccatctcaaaaaaaaaaaaaaaaaaagaaagaaagaaagaaagaaaatataatatgtaaatatcatggaatactgtatgaccataaaaaaggaacaagatcatttcatttgcagtcacatggatgaaattgaagcccattattcttagacaactaatgcagaaaggccagccatggtggcccacacctgtaatccaagtacttttggaggcaaggagggcagcttccttgaggtcaggagctccagaccagcctggccaacatggtgaaacgccgtctctaccaaaaatacaaaaactagccaggcgtggtggcttgcctgtaatcccagctattcaggaggctgaggcaggagaatcacttgaacctgggaggcagaggttgcagtgagctgagatcgcgccactgcactccagcctgagtgacagagcgagagtccatctcaaaaaaaaaaaaaaaaaaaaaaaaaaggtaaactgatgcagaaagagaaaaacaaatgcactatctcatttataagtaagagctaaataataagaacccatggatgcaaagaggggaaaaacagacacaggcctagttgaggttggcaggacaaagacctgtttgggccgggcgcggtggctcattcctgtaataccagcacttttggaggctgagttgggcagatcacctgaggtcaggagttcgagaccagcctggtccacatgatgaaacctcgtctctactaaaaatataaaaattagccgggcatggtggcaggcacctgtaatcccaactacttgggaggctgatgcaggagaatcacttgaacccaggaagcggaggctgcagtgagccgagatcataccattgcactccagcctggacaacaagagtgaaactccatctcaaaaaaaaaaaaaattaaattaaataaataaaaaaaaaaaaatacctgtttggtgctatgcttagtatcttggtgaaaaaataatctacatcaaactttcatgacacaatcttacctatgtaataaacctgcatgtgtacctctgaactaaaattaaaagttgaaaggaaaaaactcgacgggtgggggtaagtgcaatatgtaaactgaaagattggtttgtgctatttatttctgggtccatgcaggcacgtgagattatgaacaagtggcccagaaccctaagttggtggggagaacaggttgctgctgcagattcggtgtctggggaacaggaatatgccgggagactcgtagacacttttgaaggatttttgcaagaaatgctaaatcaaaaatgctgtggtgaagttcctgagggtggtgccttgtcctgagaggggtgtggatgcatcagtgtctagtgggcatgattgtgagtcggtgggaatcctgtggtggcaactgtggaaagagaaggtctgtcatcagagattctttcctctaagttttcagtcctctctcactctaagagaagacctggaatcagaaaacaatgggcagtgtgacagccagtacataggagcagagcctcccattcccagacactcagttttattccaggctagaccttttatggtatttttattctggcacaaaatctatagagtttgctgaacaccaagcaactctccaacaccaattctttatctaacatttaaattctgacaccacccagagtcagcacagatgctgattcagggcttggtctcaaaatattgttcttactacagttgccagtaacaaaccccatgggcccatttatgcttctaaattatgagcccattatgagctactgtttaaaaattcaggactcccataaacttgctcaagttcaataacttaatagtgctatacacagtacttagaaaaacactgtagttatgttgaccggattattataaaagatacaacccaggaaaagtcaaatgaaagaaatgtgtaagacaaagaaaagaggtggggagagatgaagcacgtaggtaatcctggtaaatggctataattaataaaattctccatcttttgtgtgctccagaaacagtttatggaaagaaacacacatcccattatgacttagatgatgcactcttttcttacctatcacatagccagacatagattctgcccattttcttcttattctcttagaaaacccagctgaatttgtcttcagtggtcaaaataaaatactacttaatcaaacaagtttatctccttcccacagctcctgaacttttgagctaccctcagtctaagccaacatacaaccccattatatgctcctcctaagaacattctctgatttagccaggtgcggtggctcacgcctgtaatcccagcactttgggaggccaaggcaggtggatcacgaggtcaggagatcgagaccatcctggctaatatggggaaaccccatctctattaaaaatacaaaaaattagccaggcgtggtggcgggcgccagtagtcccagctactcaggaggctgaggcaagagaatggcgtgaacccaggaggcggggcttgcagtgagcagagatcgcgccactgcactccagacctgggcagcagagcaagactccatctcaaaaaaaaaaaaaattatctgatttagaatctgattttttcacccttcatttgccattcccctcccaccttgtttctcatcttggttgctccttaatatgaaaaaaacccacccttgtctgcctaacctttgagatccttaaagaccttataattggtacttcctcctgttccaatactcctttggaacttaattttttaaatataaatctaactttatatttaaaagtctagaaacgcctcaaagcaagaacaactttatcttcagtaagatcctttcagtcccattccatcttaactgcatctgtctgtgggtcctcagctttccatggctctatagcttctcttcagataaaaggcttcttccatggctggagtgagcaggctaggaaatctgcaggggaggctccccaggaagaactaactgggcctttaataaccttcttttgcaggatcaatatgagcctttagcttggagtcactgggctcaagctttacttttccagtaagagttattcactcaggttttgaaactcagtgtttgaaaaatcaagtaaaattactcaaacacagtgctcatataaaagaaaaaaaatttaaggtgcttaagttttatacctcaataagaaaagcaaaagaatctaaactttctttcagacaataaatactttattatctccattataaatcatgtagtaaacaattagtcatatggggacacctctaggaggtaccaagttttgtcttataaaatttagcatcggccgggcgcagtggatcacacctgtaatctcagcactttgggaggccgaggcgggcagatcacgaggtcaggagttcaagaacagcctggccaacctggtgaaacactgtctctactaaaaatacaaaaattagctgggcgtggtggcatgcacctgtaatcccaggtacgctggaggctgagagaggagaattgcttaaacccggagtcggaggttgcagtgagccaagatcgcaccattgcactccagcctgggcgacagagcaagactctgtctcaggggaaaaaaaaaaaagaattagcattaaactcatacatcaagattacaggatatagaacagagatattcactctcagaaatttaccctgcaataagaggaactgatgtttttatcaatctatgtaactcagcaattatctaccacattttcttgtgaacatgtattcattttctacagccaaaatggaagagaaattttccttattcttttccttgatagctctctaaaagctaatgcttgaaattgtgtttgaaaacactcaggcaaaaaaacacacctgagaaggctgggcacggtgactcacgcctgtaatcccagcactttgggaggccgaggtgggcggatcacctgaggtcaggagttcaagaccagcctggccaacatggcgaaaccccgtgtctactaaaaatacaaaaattagctgggcatggtggtgtgcacctgtaatcccagctactcaggaggctgaggaaggagaatcgcttgaacctggtagtcagaggctgcagtgagctgagaacatgccactgcactccagccttggcaacaaaatgagtgagactccatttcaaaaaataaaaaatgtacctgagaaaatttctaaactcacagtggggaaaaaaaagtaaatgagaatttttaacaatggaatatatgagtaggtattttttgaaacctgtctattttatgtttttgtaaatattttctcacctttcaagctctactaataaaatacaatttacagtttaaaagagtcaatataagtgaacaaatcttttcaaggtgacaaaacaaaggagtggcagtgctgattagaaaacagatgtgtctgactcattcgtcaagtcaggccatccaatccctggagagattttcccaccccatcctgctcacttaagtgtccaatgaccaccttctcaggagacactgcattacgccccaatgagtgccccaagtgcattttacttggcaagttcttgtactagctcactgagatgaggtttttatctgtctttggggatacaattttttttcacaaatcttggagaatccagctggcagaaattatttctgttttcccctcaataccagcgtctgatcgctgaccagcaatatgtctccaagaaatggaaaatggcttggataaaaacaatcttaatgtctcaaagggttagcttttcaaaggaagaatacaccaggagatccctctaagccccagggcattcaccttcttcttgagaggctacactccatacctcagcttgttctataagagaaaatgacccaagagctgatattaactctagcagatagacatggtgggtatcttggtttattcagatagtacaggaccaggaaaaaactaaagggtagctgaggacacatcaccccataaagtttacaaaaaacactgacccccaaagcattatgatctctgtgcttagggaagataaaagaaaaagaggcacagatattttttaaaatacagtgtcaggggattactctttgctttcttctcatggaaaatatttaaaaacagaaaacaaatttttaaaatgttttcaatgtgttgtcagtaaataattaaaatacagtatgaaaaatatacactaaaggacaaatagttcataatgtgaattagggaaagaaagttgacagttccttgaagtaaagtactaaattttcagttctcgagattgtcagaactggaaatttagtatgtatttttacttcaagccagagttaggctggaggtaaggagaactgggggatacacgggagaccctgcttggaacacacgtaaaaaatgcggggaaaatcagtcctctgtggagtgtgaaaatagttaagtgccaggcaattagtctgaggtggaaatctaggccctggattcttgctttgaaaaaaaatctaactcaaatgcattttttttttttttgtaaattactacattagaggaaacaaaattcaggcttaaccgactataaactgtcaattaagctccaattacacaaccaggaaatttgtacgttcaaggtggaaaataagaaactgaggcagggagcactgactcatgcctgtaatcctaccacttagggaggctgaggccggtggatcacctgaggtcaaaaggtcgagaccagcctggccaacatactgaaactctgtctctactaaaaatacaaaaattagccgggcatggtggtgggcgcctgtaattccagctacttgggaggctgaggcaggagaatcacttgaacccgggaggtggaggttgcagatcgtgccactgcactccagcttgggcgtcagtgcaggactccgtctcaaaaaaacaaaacaaacaaacaaacaaaaaaaactaagaagaagaaaagaggagagaaacaaacaaacaaagacaggaagacagaaagaatataactgtacctaaccaattattgaatttgggatttttgcatcatgcaccttatcaaagtccttcaagcccctcttataaaccaaaaactacaacccataggggtgctctaaaatttttgaaccactctttgattaaattatttaatatttttgcagagactgccttttttttttttttttctagacagagtcttcttactctgtcgcccaggctggagtgcagtggcgcgatcttggctcactgcaacctcctcccaggttcaagcgattgtcccgcctcagcctcccgagtggctgggattacaagcatgcgccactatgcccggctttttttttttgagacagagtcaagctctgtcacccaagctggacagcaaatggcgtcagctcgcctcactgcaacctccgcctcccgggttcaagcgatttttctgcgtcagcctcctgagtagctgggattacaggaccgcgccaccacgcccggctaattttttgtatttctagtagaaacgggggtttcaccatgttggtcaggctggtctcgaactcctgacctcgtaatccgcccacctcggcctcccaaagtgctagcattataggcgcaggccactgtgccagactaatttttatatttttagtagagatggggtttcgccatgttggccaggctggtctcgaactcctggcctcgggtgatccgcccgcctcggcctctcgaagtgctgggattacaggcgtgaaccaaagcgcccggcctgccataaatttttaatagggggaaagatgaactggaaacgcagcggactaaagcccttcccattcatgaacccgctccccgagtcaggattctcccctgactaccctcccttggtccctgcacaatctgggagagacgctgcgctgcgggagcagagctgcccagagagggctccaggtcagggcacagtcactgggcggggaagagacaagacgcccgggggccggctgtcagcgaagccgccatcttatggctgaaggggactgaggcccagctgggcaaggagaactcagggcgcagtttgtggagatgactgcggggaggcccgagtccgccacagccacttcccacaggtttcaaccagcccctccctctctctccggatgtcggagccgccactctcaccatttctaggcttccaggggaggccctggcgtcttagctgtggatctcccaatgcttgcaggtcagagggccacagaggctgggcctctaagagcaggggacacaaagcagggaagacgagaccaagcgctccagctgcagcgagagacaaaggccccgccaaatcccggaagccgccctgtccgctccagttgcgtgcctgattggacggtccccagctcagggtccctgattggaaaacgtctaaggcccagccccttcaggccttaagtgacagaagacctgaccaaacgctggactgaatgaagaaagagtgacagcctaagctgcagcgttttcaggcagggcttcctccctgagcttagcccaccccggagggtatttgcatttgacctcgtgtatgaggtttcatgtatttataaataacatactatacggctattcacaaatgaaaaatatataataacaataattttaaaatttcagtttttatgatcttcctggcttctggcatttgagcaagcagcctgagacttttttaaaaaggcaatcctctgaaataaaatataagccacatgtgaattttgaattttctagtagccaactttaaaaagaaacaagaaaaaggtggagttgattgtaacaatttaacttacccaatatatccaaaatattatcagtttaatatgtgagcaataattatatatgtatatacatgtatatgtatgtatatatgtatatatgtgtgtatatatgtatatatgtatgtgtgtatatatgtatatatatgtgtgtgtgtatatatatatacatatatatatatatatatatatatatatatatatatatcactaaatctttgaaactcactctgtattttaccattccagcacatcgcagtttagaccagcgacattccaggcacccaggagccacacgtggccaatagctgccatattgaagtgcagctgcgatgtcagctgagtgaagggcctggacatcagaggtgggggaaagcctcttcctaccaacatctcttcagttcccagggtggaacagatagtggccataaaagagcagaaggcagcaagaataaaataaccacacatagaccactgctggccacctgttgaccaccttccttccagattaaacagtgaacaacaagtgatggggtgacaggagaagtaaactctatgtcttcatatctgtccagtcttttttgagacagactttcactcttattgcccaggctggagtgcagtgaagtgcaatggcaggatcgcggctcaccacaacctccacctcccaggtccaagcaattctcctacctcagcctcccaagtagctgggattacaggcacgtgccaccacacccagctaatcttttgtatttttattagagacagggtttctccatgttggtcaggctggtcttgaactcccgacttccggtgatctgccggctcccacctcccaaagtgctggaattacagacgtgacccaccacgcccggccttttttttttttttttgagacagacttgctctgtcacccaggctggagtgcagtggcacgatcttggctcactgcaacttccacctcttgggttcaagcaattccctgcctcagtctcctgagtagctgacattacaggcgcccaccaccacgccgagctaatttttgtatttttagtagagacagaatttctccatcttggccaggctggtcttgaactaccgacctcatgatccacccgcctcagcctcccaaagtgctgggattacaggcatgagcccagccttgtccacagtcttgacctccaatgtttatatatgaagaaaacagattaaaggcaaacttattttgctatttgaccttggccctaatggtcaggctgtggttatctgttttattttgtggtgtgggggggtctgtgtaagtacaaatcacatgcataaatgtctacgtgtatttctgcattactcagcattatcttacaagacatccaactttctttttatttatttattttgagacagagtctcactctgttacccaggctggagtgcagcagcgcaatgcgaccttggctcactgcaacctccacctcccgggttcaagctattctcctacttctgcctccccagtagctgggattatgggtgcgtgccaccacgcccagctgattttttttgtatttttagtagagacagtgtttcaccatgttaaccaggatggtcttcatctccggacctcgtgatctgcccacctcggcctcccaaagtgagccaccgtgcccggccaagacatccaactttaaatcagaaataaaaaattagaggctgggcacggtggttcaggcctgtaatcccagcactttgggaggcaaggcaggtggatcacgaggtcagaagatcaagaccatcctgactaacacgacgaaaccccgtctctactaaaaatacaaaaaattagctgggcgaggtggtgggcgcctgtagtcccagctactcaggaggctgaagcaggagaatggcgtgaacccaggaggcggagcttgcagtgagccgagatggtgccactgcactccagcctgggcgagactgtgagactccatctcaaaaaaaaaaaaaaaaaaaaagtttgtgacttatgtataatctttaataaggcgactttaaaattattggtaaagtagtatcagcaatgtcttaaatattgttagcattttgttaacttttttgagatgtagtctcactctgccgctcaggctggagtgcagtggcgcgatcttggctcactgcaagctccccctcccgggttcaagcagttctctgcctcagcctcccgagtagctggtattacagacgcctgccaccatgcctggctaatttttgtatttttagtagagacggagtttcaccatcttggccaggctggtcttgaactcccgaccttgggacccacccgcctcggcatcccaaagtgctgggattacaggtgtgagccactgcgtctggaacatttttttaatcaaggggtttttggccaggctcagtggctcatgtctataatcccagcactttgggaggccaaggtgggtggatcacttgaagtcaggagttcgaaaccagactggacaacatgatgaaaccctgtctctactaaaaataccaaaagttggccaggtaccattgtgcatgactgtaatcccagctactcaggaagctgagggaggagaatggctttaacccaggaagcagaggttgcagtgagccgagattgcaccactgtactctaccctcactgacagagtgagattctgtctcaaaaaaaaatcaagtggttttatgattcctccaacaatactataagatttgccctaagggttacaaatgataaagcccagcacatgacagaataacctttgcttgcatatgcttataaaatattgttggcttaatgaaaacagctaaattgtacacttttggtataaacttttttttttttttagaatggtatgaggtcacaggttggtttaagagtgtgccctttcttaaggatgatatgcatggaaaggccaaaagcaatttcaggataccaaaaaaacttcccctaattggcactttaactagtgaggctggggtggaagagcttttcattgacattcccctttatttaacaatttatttagttgaatcaaataaggtactccttttacttttacaaagcccggatggcttctctaccatccaaggaggtaagaagttaaactgagagttttgattgtttttgttttttgagatggaatcttgctctgtcacccaggctggagtgcagttgcttgatctcgccttactgcagcctctgcctcccaggttccagcgattctcttgcttcagcctcctgagtagctgggattacagatgctcacctccacacccagctaatttgtgtatttttagtagggacggggtttcaccattttggctgggctggtcttgaactcctgaccttaggcgatctgcctcccaaagtgctgggattacagggatgagccaccacgcccagccagctgagagttttaatcctctattacacaattggtttctctggcaatcaatcctggtcctgaggctgtccagaagcctccagccagaaatcatctcattaacatacaaaagatgcttctcttttcagacattctaaagattttaggggctgcatacaaagaaactgagacaaactaaatactgacattgataagagcctccagacctggctcagctctggcagtctctggaaagctttgctttactcacctccttttaattagaacctacccccaataaccctgtggacattctttatagcagcggcatgttctggcatttcacatctttgatataatcttggtgtttgttgtttacttccttatacttttgttccggggagctatgtcttgtttacactatattcccagtgccaatcacaggcctcagcccatggcaggtgctcaatgaatagttgtttaatcaatgcacaatggcattgtctgtaaaagggaagcaaggagtaggttagagcacagtttagctcagccacttcctatctggctgactttgggcaagttcctgaattttttcttctttcagtcaccttgtctgtgacacgaggaatcattaaacttacctacagagtttctgctgatgaagatttaatgagcaaaaatatctaaatggctttgaaacactggctggcacagcaagagtgctccacacatcaactgtgtcgactaagggtcaaactctttaaaatatttgaagaaatttattgagtcaaatatgagtgaccatgccccatgacacagccctcagaaggtcctgaggacatgtggcaaaggtgttcttcaaagtgttcattattaaggcatccatctcccataacttcaatgcactttgctaaacaatgcattatttctgaggacatctgaatctgtttctgtaccaatggtcttaatcagaacatcacataaattgccacatctgtgtgagatactcaggaccacggactctcacacactccagaagaaaaggcacggattctgctgctgcccctccaacaccattgtggaaataaaatttcagtaaagggaccaccagtttgacaacctgcttggtgtactccacaaagcagtcaaatcagctatgtgctgcaaaaggtcactttttttttctttgagatggagtctccctgtcacccaggctggagtgcagtggcgcaatctcggctcactgcaatctccgcctacctggttcaagcgattctcctgcctcagcctcgtgggtggctggaactacaggcgcctgccaccacgcccagctaatttttgtgttttaagtaagatgggggtttcaccatgttggccaggctggtctcgaactcctgacctcaggtatccactcgcctcggcctcccaaagtgctatgattacaggtgtgagccaccgagcctggccaaggtcacaattcttcctgtgagcagagaccaggtaacagaagaaaatcacatcacctgtgtgagtggtgcaaagacaatgtcctctggtgccaggacccaggcataaaagttacatcacctggatgttggacccagcaatatgtcacaatggcccaagtaggcagagacagaagagtcagataatgtcagtgcagggcccagcaatgtcacaaagtctcctgcaggcaaaacctaaaagaagagaaaagtgctgggcatagcaatatgctacaatgttcctgtaagcagggaccaggcagaagaagacagtcacatcgcctagatgctgggcctagtgatatgtcaaccatcttttctgtaataaagacccaagcaggagaaacacatcacctggttgctggccacagaaatgtgccacaattttccctgtaagcagggtgctggcaaaagaggagagtcacatctcctaggtaataactgtgacatacctgtgcagaagtatgtcacaatgcccccttcaggaaggggccaggtagagaactcccgtcccttaggtgttgagcccagtgtcacatttgggtatgtcacaatacccaaatatgtggggcctgagaaaaagaggagagtcacatcaccaagatgctaggccaatggtatgtcacaatttccctgtgagcagagaccaggcaggagaagagtaacattaccatggttatgggcattcagttatgtcacaaagccccctgtagtcaaggcccaggaaaatgttacatcacttgggtgttgagcccagcaatatgtaatgatgtctaatgtgacacattgtgctgcaatatggcacaacatgcaggacataggttggagagtcacataacatgggtacaggatccagcaatatttgacaatacccaaaatttgtggtgtccaaaaagaagagtcacatcactgagatgctgggtccagtgacacatcacaatcttcactttgggttgaaccaaggcaggaacatcaaaccactcaggtgtgtaacaaagacatatgtcacaatcacacctgcaggaaggtccagtaattaaaaatcctgcacatgtcccagttctaggtatcagagtatgttgggtctaagtatgctagtgacaatctcaccaactggatctgtgcatgagagctgagagccttcatcccttccatgaactgtttggccctaagcccaggtaggagagtcaacatgtcccccagccaattagggacatgttgactatcctacctaggcttagacaggtagaattctcacctatgaactggatttagaaataagtcattatttcaactctagccagatgttcacatatgacagtcacaattttaactgtagactgtgtgtgtgtgtgagattcagggcctcaccagtgggctctgtccatgtgtgagggtgacaattctaacagttggtggggagtgtatatgagaaacaatctcatctgtatgctgaaccctgtaatgacactctctgtaccacaagagatttatacagtatgcaagaaagtggcaattcttcatgacctttgtacaaggagacccagaatcatattcatgactctaggcctagctgttaagagacagcatcttgggctgggcacagtggttcatgcctgtaaccccagcactttggaaggccgaggtgggcagatcacctgaggttgggagttcgagaccagcctaaccaacatagagaaaccccatctctactaaaaatacaaaattagctgggcgtggtggcacatgcctgtaatctcagctacgtgggaggctgaggcaggagaatcgcttgaacctgggaggcagaggttgtggtgggcagagatcacgccattgcactgcagcctgggtaacaagaacaaaactgtctcaaaaaaaaaaaaaaagaaaaaagagagcgagagcaagagagagcatctctcctattaaatactgtgaggtatgagagtaatcattgcatctgtgatctaggtcaagatatattttacaggccaggcgcagtcactcacacctgtaatcccagcactttgggaggctgaggcaggtgcatcacctgaggtcaagagtttgagatcagcctcaccaacattgggaaaccctatctctaatagaaatacaaaaattagccaggtgtggtggctagctactaaggaggctgaggcaagagaattgcttgaacccaggaagcggaggttgcagtgagccaagatcatgccactgcactccagcctgggtgacaaaatgaaactgtctcaaaaaaaaaaagatatattttacaatcctgcctatgaatagggagagaggagagtcacatcatctgggtttttagccaggaatatgacacaacctttttttttttttttttttttttgagatggagttttgctcttgttgcccaggctggagtgcaatggcacagtcttggctcactgcaacctccgcctcctaagttcaagtgactgctgtgcctcagcctctcaagtagctgggactacaggtgcataccaccacgcctggctaatttttgtaatttttttcccaagatggaatcttgctctgctgcccaggctggagtgcagtggcatgatcttggctcactgcaacctccacctcccgggttcaagcaattctcctgcctcaggctcccgaatagctgagtttacaggtgcccgccaccacacccgattaatttttgtatttttagtagagacggggtttcaccatgttggccatctggtctcaaactcctcaggcgatccacccacctcggtctccctaagtgctggggattactggcatgagccaccgggcccggcttgacacaaccttttctgagggcagagatcagtcaggagtgtgactgcatactcagccaggaataagttacaaccttctcctgaaagcagcacacaggcagcagagtcacatcacctgggtgctgagcccagcaatcagtaacaatgctctctgtggtccaggcccaggcagcagagacacatcacctggtacctgggccagccacaattttttctgtggggcacgtacaggcaaaaatggagcatcacatctcctaggttattgatgcagaggtatgtcacaaggccctctgtagaaagagcccaggtggtagtctcccattttataggtgttggacctagtaatatgtcttaacatgaaaaatattcagggcctaagcaaaaaaggagagtcacataacctgagtgcagggcttaggaatatgtcacaatgcaacatgtgggcagctccaaggctggaaaaaagagtcacatcttggaggttcagagtcaagccatatgtcacaatctcatttgtgtgcttggccaaggcaggagagtcaaatcactaaggtgctttgcaatgcacacaatcacacctgcaggaaagtccagggattagattagaaattccaaacatgtccaggttctaaaggtatgaaagtcaacacctcctgtatgttgggtctaagtacatgagtcgcaatcacaatgattgacagaatgtgtgcaaaagagccacagtttcttctgcagactgtatcttcttagtgtagtcacagccttacatgtgcgctgaaccttggtctggaagtcactaacccacctgtggaccagatccacacatgagaggcaattatccaacttttgacagcctctgtgaaattcagaacttcaacagtgggatgtgtttatgtgggagaatgacaatctttactgttgcctgggtgtgcattcgagagacactctgtgtcacctgaggactttatacaatatgcaagattgataatcctctatgacctttgcacaaggagctccagaatctttcctgtggttctaagcccagatatgagagtcaacatctctctcaccaactgagtccagataggagagtcttcaccttcctatgagctggatttagaaatgagtcaccatcccaactgtagccagatgttcacatatgacagtcacaattccaactgcggactgtgttcacatgtaattcagaacctcactagcagactctgtcaatgggtcagggtgacaactgtaaaggttggtgtagtgtgcataggacaaacacaatctcacttgtgtgctgggccctgttatgacattctctgtaacacactagggcgtaatatatgtgagagagtagtaattctttatgacttttgtacagaaagacttcctcattttcctaagcctgagagcaacattctctctgctattggcttcttcaaggtatgacagtcatcattacatctgtacgcttggccagatatatgtcacaatcctacctgtatgtaaagagcaaattcaagagttacatgaactgtgtgttgggccagggctatgtcacaatcctccctgagggcaggcatcaaacaggagaatcacatcactgggggcttgaccagggatgttacaatccctcctgaaagcagggcacaggtagaagagtgagatcccttgggtgctgggcccagatatgacagacaaaacgactggttgctgggcccaacaatatgtcaaaatcttccctgtgggcagaatgcaggcaaaaatacagagttttatctcctgcatgatggatgcagaaatacatcacaaagctgggtgcagtggctcacaactgtaatcccagcattttgggaggccaaggcaggtggatcacctgatttcaggagtttgagaccagcctgaccaacatggagaaaccccgtctctattaaaaatagaaaattagccgggcatggtggcagatgcctgtaatcccagctactcgggaggttgaggcaggagaactgcttgaacccgggaggcggaggttgcggtgagccaaggttgcgccaccgcatgccagtctgggcaacaataacaaaactccatctcaaagaaaacaaaaaacaaacaaaaaaacatcacaaggcctcctgtgggagggactcaggcaggagccttccaacccctaggtgtttgttccagttgtatatcacaatgtctaaaatatgcaggtctcaggcaaatgaggagagtcatatcacctaggtgctgggtccagtgatctgtcacaatcttttcttttggcaggcctgaagcagaagagtcacgttacctagataatgaataaagagatgtgttatttccgtgggagcatccatgcaggacagtcacatcaccttggtgttggacccagagacatgttgcaacacacaatgtatgcaggtcccaagcagaagaggagagtcatatcacctaggttcttggtccagaaatatttcatgatatttctggaggggagggcctaggcaaagaagtcacattacctaagtgagaggcctaaagatatgtcacaatgcctcctgcgggtagggctcataaacaagaggagagtcacataacgtaggtgctgggctcagctttatgttacaatcatcccagtaggaagggcccaagcatgaaagaaaagtcacatcacataagagctacgtcaagcgatgtatcacaattcccactgtggaccccagaagaggagtcacatcatctaggtgatgggcccaaacatatatcacagtgacttgtgtgtgcaaggaccaagcagaataattacatcactggtgtgcttggtccagtgataagtcactctctattctgtgggcacggcccaggcagtagaggagtgtcaaatcacgtaggtaaaagagggcatttatctgtgcttttcccacaggagagattgcagtgggtcaacagataggtcacaatgcttcctgtgatcagggttcaggcagggaactcacatcatcttggtgctgggcacagcagtatgtctcaatgccttccaagggcacagccaaagcaaataactaacatcaccttagtgttaggcccagcaatatgtcacaatctcctttgttgtcagaacctagaataaagaaaagtcacatcagctaggtgctgggcccaatatgtcccaataccccctgtgagtacagaacagggaggaataaaaagtcacatttcctgggtgattggtgaagacatatattacaatgccctctgtagacaggtccagggtgaagcgttacatcacctgggtgttgcactcagcaatgttacaatggcctatgtgtttagggcacaagcaagagtcacataacatacgcccagcaatatgtcacaatacacctgtgggcagcaccaaggcagaagaggagactcaaatcacctaggtgcaatgcccagcgatgtcacaatgacccctgtgggctgtatcaaggcagaatagaatcacattaccaagggtctggatccagtgatatggcactgtgagctggacccaggaaacaacaaataactcagatgctaggccaaggtatatgtcacaattacacttgtcaaaaggccttgcgatgacattaacaattacacacatgtcctgagtcaagggatgagagtcaacacctcctgcatgttgggtgtaagtacagggtggactggatttgtgcgagagcctcaatttcctttgcaaattgtgtgccttagactgggcacggtggctcacacctgtaatctcagcattttgggaggccgaggtgggcggatcacttgaggtcaggagttcaagaccagcctgaccaacatggtaaagccccatctctactaaaaatacaaaaaattagccaacatggtagtgagcacctgtaatcccagctacttgggagaatcaggcaggagaatcgcttgaacccagtaggcagaggttgcagtgagcggagatcacgccaccgcactccagcctgggttacaagaatgaaacttcatctctaaataaataaagctccttagtgaagttacagtcacaaaggtgtgctgaattttgattaaagagtcacccaaatgtggacaaaatccacacaaatgagagtcaattttccaacattcaactgcctccaaaagtgagattcagaacctcaaaagtagggtgtgtttaagtaaatgacaatctttgctattgactgggtgtgaatgtaagtttgacaatctcacctgtgtgcttggccctgtaagggcactctcttgaggactgtatgagttgcaacctactctgagaactttgcgctgctttggacccatgatcttatgtggtcctaagtctaggtatgggtcaacatctcttcaattggctgggtccagagaggagagtcctcactcacctatgagctgggtttagaaatgagtcaccatctcaactgtggccacgtttacatatgatagttacaattttaactgtggactgcatctgtgcatgagaattatgacctcatcagtggactttcaccatgtgtgacgatgacaattctaaaaattgtcagggagcgcttacatgaaacatgatctaacctgtttgctgggtcctatgatgacatgctctgtatcatctgagtgctttatacaatatatgagagtggtgattcgctataaccttcatgcagagaggagacctgagattttactcctttttctaagcctagctgtgagagacactatctcttctattgactggtatgaagtattagagtcatcatcaaacctgtgagctgggatgagatatatgttaccaatcaacttgttggcagaaagcacccaggagagtcgcatcacctggatgctgggccactgatatgtaaattttttccctgagggctgtgaaaagccaggagagtcacatcatctgggttttcaaccagtgacatgttacaactttctcctgaaagttatgtacattcaggtgagacacaacagctggcggccaggccctgcagtgtcacaatctttcctgtgggcagggtacaggcagaaaaggtatcacatgttttatgtaatggatgcagatatatgtccagatatatgtggacagggctgaggcaggagcctcccattttttaggtgtttggcccagtgaaatgtcacaatacccaaaataagtggttgctagacagaagagtctcatcacctaagttctggtttaagtgatatgtcacaatctttctttttgacagggttcagggaggaaaggagtcatatcactgagatgaacaaaaataaatgtcctaataaccccatgctcaaggtccatgtgagagagttgaatcacccatgtgttgaacccagtgacatgtcaaaatatacaatttatgcagggcccaggcaggagaagacagtaccttcacctaggtgtcaggcccagtgatacatcacaataccttctgtgacagagtccaagcagtggagaagagtcacattacctaggtgctgagtcaaaaaatatgtcacaaaaatcactgaagggagggcccaggcaggagtcaaactacgtaaattaggggctcagagatatgttgcaatgacctctgtgggttggactcaggagaaacaggagagacacataacctaggagctgagtacagctatatgacataatcacccaatttgataagcccaggcaaaagaagagagtcatatcacataagtgctgggccaagtgatgtgtcacaatcctcattatggacagttcccagaaagaaaaggagagttacatcatctaggtgatgggtctagatatgtcacaataagccatgtgggctgggatcatgcagaagaatcgaatcacttgtgtgttaagcctagtgataagtcactcttttctgtgggcatggaccaggcagggtaggacagtcataatatctaggtgctgggcccagagataggtcacaatctctactattagcaaagcccacgtaagaaaagagtcgccgggcacagtggctgatgcctgtaatcccagcactttgggaggccgaggcaggcagatcacctgaggtcagaagtttgagaccagcctgaccaacatggaggaatccttctctactaaaaatacaaaaaattagctgggcatggtggcaggcacctgtaatcccagctacttgggaggctgaagcaagagaattgattgaacccgggaggcggaggttgtggtgagccaagatcatgccactgcactgcagcccaggcgacagtgcaagactctgtctcaattaaaaaaaaacaaacaaaacaaaaaaccccaaaaaaacacaaaggaaaaaaaaacaacaaagctctactgtgtactaaatatttcacaaaatattttttctttttttttttttttgtttttttttgagatggagttttactcgttgcccaggctggagtgcaatagtgtgatctcggctcactacaacctctgcctctcaggttcaagcgattctcctgactcagcctcccgagtagctgggactagaggcacccaccaccatgcccagctaatttttatatttttagtagagacagggtttcacaatgttggccaggctggtcttgaactcctgaccttgtgatccacccacctcagcctcccaaagtgctgggattacaggcatgagccactgcatctggcccagaaaattttcataaacaggggcaaatattattacttctcataaattattgttgtattgtgcattaatatataaaaaattgctaggataaaatttagtagtcaatatagcccaagaaagattgttgccaggcatggtggctcatgcctgtaatctcagcaatttgggactccaaatgatcccaaaggatcacttaaagtgaggagttccagaccagcctggccaacatggtgaaacgtctctatttaaaaaaaaaaaaaaaaaaaaaaaaaaaaaaaaaaaaaatcagccaggcgcagtggctcacgcctataataccagcactttgggaggccgaggcgggtggatcacaaggtcaggagatcgagaccatcctggctaacaaggtgaaaccccgtctctactaaaaatacaaaaaattagccgggcgtggtggcgcctgtagtcccagctactcaggaggctgaggcaggagaatggcatgaacctgggaggcagagcttgcagtgagccgagatggtgccaccgcactgcagcctgggcgacagagcgagactccgtctcaaaaaaacaaaaacagaaacaaaaacaaacagaaaaaacattagccaggctttgtggcgcgtacctgtaatcccagctactcaaaatgctgaggcagaagaatcactaaaacctgggagacagcagttgcagtgagccaagatcgcgccactgcaccccatcttgggtgacagaagatgactgtctcaaaaaaaaaaaaaaaaaattgttgccattcttgctataatgctataaacctgtaaattctataaaactctcaatttcatattctccatgaattcttacaggcacacacctgtaatcccagctacttgaaaagctgagacagaagtattgcttgaaccctgaagacagaggtttgcagtgagccgaaattgtgccactgcactccagcgtggggaataggcaagactctttcccaaaaaaaaaaaaaaaaaaaaaaaaacacagaaacataagcccaaccccggatctcttgaatgagaatctgcatctcaagatgatctccagtttattgttgcacatgatacaatttgcaaagtgtgcttctaaatcactgacttttctacctgataattatacacagctgattctggatgatttaaaatagcactcaggccaggtgcggtggctcacacctgtaatcccagcactttgggaggccgtggtgggcagatcacaaggtcaagagatcaagaccatcccggccaacatggtgaaaccctgtctctactaaaaatacaaaaattagctgggtgtggtggcctgcgcctgtagtcccagctacctgggaggctgaggcaggagaatggcttgaacccgggaggctatgttgcagtgagccgagatcacgccactgcactccagcctggtgacagagcgagactctgtctcaaaaaaaaaacgtaaaaataaatttaaaaatataaaaaattagccaggtgtgctgttgcacatgtaatcccagatactcgggaggctgaggtaagagaattgcctgaacctgggaggtggaggctgcagtgagctgagactgtgccactgcactccagcctaggcaacagggcaaagacctcgtctcaaacaaaccaacaaaccaacaaacaaaccaggctgacttctgcgtaaaatattccctgatctagcatctactttcaccatgttctatccctccccttcccactttttttctgactttgttttctcttccttatgaaagaaagtccttttctctctaacctttaaaattctccaacatcttataattggtgctttccccttgttgcaatactcctttaaaattaagtaacttcattagctgggcatgatggcgggtgcctgtaatcccagctacttgggagactgaggcaggagaattgcttgaacccgggaggcggaggttgcaatgagccaagatcaccccattggactcgagcctagggaactgagcgaaatgccatctcaaaaaaaaaaaaacaaaaaattaagtaacttcttaccaagcacagtggctcacacctgtaatttcagcactttgggaggctgaggtgggtggatcacctgaggtccagagtttgagaacagcctgaccaacatggtgaaaccccatctctactaaaaatacaaaaattagccaggcatcagggcgcctgtttgtagtcctagctactagggaggctgtggcaagaagatcgcttgaatctaggagacagaggttgcagtgagccgagattgcaccactgtactacatcctgggtgagagaatgagactcaaaaaattaagtaacttcttacctaaatctaaatttgtcatattttacaaaatctagaaacaacctcagaataataacaactctattcccagaaagagcttcccaaccccacttttgtgccaatcccaactgcatctgcctgtggatttcgaggttttcagggctccgtggcttctctaagtataaatgctctgtccatggctattgtgagcaggccagaacatctgcaggggaggctcctcaggcagaactggctgctccttcaatgatctcactttacaggcaaagctgtccttagcttgcagtcactgagttcaggcttctacttaccagtcagggttactcacttagttttaaataagaaaatgaccaatgtaaggccaggtgcggtggttcaatgcctgtaatcccagcactttgggaggctgaggcaggaggatcacttaaggtcaggagttcgagaccatcctgaccaatttggtgaaccccatctctactagaaatacaaaaattagccgggcgtagtggcatgcacctgtaatcccagctatccataaggctgaggcatgagaatcccttgaacccgggaggcgcaggttgcaataagccaagatcgcaccactgcactccagcctgggcgatagagcaagactcagtctcaaaaaaaaaacaacaaaaaaagtcaaaaaacgaaaatgaccaacgtttcaagaaaagagtaaaatcactccaacacattgtttatagaatattgtaaggaaattgtaagacttaaattttctactacaatataaaaagcttaagtaggtttgggcacagtggctcacacctgtaatcccagcaatttgggaggctgaggtgggtggatcacctaaggtcaggagttcaagaccagcctggccaacatggtgaaacccgtctctactaaaaatacaaaaattagctgggcgtggtggtgcttgcctatagtcccagctacttgggaggctgaggcaggaggatcgcttgaacccgggaggtggaggttgtagtgagccgagatcatgccactgcactcaagcctgggtaacacagtgaggctccatctcaaaaaaaaaaaaaaaaagaaaagcataagtatctgtccttttcagacaataacatgttatttaaatatttccctgatagacaatttaataaacaactatatgtgaacatttctagaaggtgtcaagttccatctcataaaatttagcattaaacttggacattcagacaacagaatacagaacagagatacccatcgttacaaattctagaccctgcaaaaaagaggagttgatggtttgagaaatatatacaatgcaccaattaatctatcacatttgcttgtagaaatgtattcactttctatagctttaatggaaaaaagatttttccatttctcttctctgacagcattccccaaagcaaagccctggggttctatttaaaatcttgcaaccggccgggcacagtggctcatgcctgtaatcccaacactttgggaggctgaggcgggtggatcacgaggtcaggagatcaagaccatcctggccaacatggtgagaccccgtctctactaaaaatacaaaaaattagccgggcatggtggcgggcgcctgtagtcccagctgctcgggaggctgaggcaggagaatggcatgaacccgggaggcagagcttgcagtgaaccgagattgcaccactacactccagcctgggtgacagagcgagactccatctcaaaaaaaaaaaaaaaaaaaaaatcatgcaaccagaaaaaacagacatgagaaacttactacattcactctggggaagataaaggtaaataagaatctgtaacaaataacatatatgactagatttttctgaaatatacctttcaaagtctttgactttttaaacatcatttaagctcttttgatgaaatgtaacttacagttattaaaaaactgaaatcaaaataagtgaaaaaatctttccaaggtgacaaactcaggaagtggcagtgctgattggaacacaaacatgtctgactccactgtcaagtcagaccataatatcactcaaaacattctcccatccccaccctgcccattaaattagtgaccaccttcccaggagacactgtactgtaccccactgtaagcctcaggtgcattttgcttcaggttcttgcattgccttactgggatgggagcttcttgtcctttggaaaaaattttatttcaagaatcaacagaaatcatttctgctttttctcatcaataacaacatctgattggctcaccaccaacgtgtctactaagaataaaaattaggttgataggttgagaggccgggcgtggtggctcacacctgtaatccctgcactttgggaagtgggtggatcgcctgaggtcaggagttcgagaccagcctggccaacatgatgaaaccccatctctactaaaaatacaaaaaattagccgggtgtggtggcaggtgcttgtaatcccagctactcaggaggctgaggtaggagaatcacttgaacctgggaggcggaggttgtagtaagccgagattgggataatgcactccagcctgggcaacaagagtgaaactccatctaaaaaaaaaaaaaaaaaaaataggttgagaagaaactttttaactgtttacacacttgttcatttttatgtcatcagggaagacccctcaatatatttcagagtcaacgggtaacattttatttttaataattttttttgagacagagtctcgctctgtcacccaggctggagtgcagtggcatgatctcagctcactgcaacctccgcctcccaggttcaagcgattctcctgcctcagcctcccgggtagctggaactacaggtgcccgccaccacgcccagcgaatttttgtatttttagtagacacagggtttcaccatattggctaggctgctcttaaactcctgactttgtgatccgtccacctccaacctcccaaagtgctgggattacaggcatgagccaccacgcccaggcttttttttgttttgttttattttttgagatggagtcttgttctattgcccaggcaggagtgcagtggtgatcttggctcactgcaacctctgcctcccgggttcaagcaattctcctgcctcagcctcctgagtatctgggattacaggcacatgccacaacgcccagctaattttttgtatttttagtagagacagggtttcaccatgttggccaggctggaaataattttttactctgggactgggtgcagtggctcatgcctgtaatcccagctacttgggaagctgaggtgggagcatcacttgaatctgggaggctgaggttgcagtgagccgagatcgcaccactgcactccagcctgggcaacagagcgggattctgtctcaaaaaaaaaaaaaaaggtatactctgcaccagcagcattaacacaaaaagttctattaaaccctgacacccactcaaatgtcacctcctttataaagctctgattttccctctatgtcagtggcacaattgatcactattaccattcagctcaataccttatgtctttttatgtgcaagtattattctccagaataaattaatcatttacacatctatccatgctaatgaactataaactcctacagggcaggtatgttgaaccctgttcatctgtgtaatcaaaatgtcttatacataataggtatcatatacaagcaaaatccctgtcagggaattattggaaaagctaccaaattcttttaagttcaagggtacatgtgcaaattttttacatagataaatgtgtgtcatggcgattttttgtgcagattatttcaccacccaagtattaagcctactacccattagttatttttcctgatcctctcccacgtccgataggccccagtatgtgttgttcccctctatgggtccatgtgttcccatcacttaactcccacttgtaagtgagaacatgcggtagttttctattcctgtgttagtttcctaagaataatggcttacagctctgtccacgttcctgcaaaagatatgatctcattttttgtatgggtgcacagtggcatggtgtatatgtacaacattttctttatccagtctatcactgataggcatttaggttgattccatgtctttgctattgtgaattgtgctgcagtgcacatacgcatgcatgagtctttataatagaatgattcacattgctttgggtaaatacccaataatggattgctgggtcaaatggtatttctgtctttaggtctttgaggagttgtcacactgtcttccataatggttgaactaatttacactcccaccaacagttcataagggttcctttgtgaaaaaataattttaattttctaagaggttagctttttagacaaatagtatacaagaaaattttccacaggcctaggccatccagctgctcttctgagaggctacactcttactcctcaggctgttctccaagagatgacccaggggatgatattcattagacactccaagagatatggccactgtgggtatcttggattatcccagaccattctgaaactcatgaccaaaaaaagactggagggctgctgtaaagggctctgtaatttctccaaagcaaagcttcaacccaaagatttactaaggtgtgtgtgcctagaaaagataaaaggaagagaggcacagatttttttttttcccagtggaatttcagaggattattttctacttttttctcacgtaaaatgtttacagacttgggaggctgaggcgggtggatcacctgaggtcaggagttcgagacctgcctggcaaacaagacaaaagcctgtctctactaaaaatacaaaaattagccagtcatggtggcagaagcctgtaatcccacctacttgggaggctgaggcaggagaatcccttgaacctgggaggtggaggttgtagtgagctgagatcacgccattgcactccagcctgggcaacgagagtgaaactgcctcaaaaaaaaaaaaaaatgtttacagacagaaaacaaatctttaaaaacctgccattcactgctgtgtaaaaacatgattaacaattaaaacactgtgtttgaaatgtacaataaaggacaaatagttgatagtgttgtaaattggagagaggaagctgtcctcatttcctacatttgagaatgtaggaatgaaagcggacatttataattttactgcaagcctgagttaagctaggagaaaaggtggatttgaagtcctgcttgccatacattaggaagtcacagaggtaaaccagtcctgtggagtgttgagataactaaaaagcaggaaattagactgaagtggctctagtgccctgtgttcataagtaaaaaatgaaaaacctaactcaaattcacttcttataaattactattttaggcagaaacaaaattcaggcttaaccaatcataaacctgcaattaacctctgattacataaccaggaaatttccacctgaatcatacaaataaggtgactacataactgtaaccaattctccaatttggtttgccttctcacacgccctttataaaaccctttcctttatgtctctcaggtgggccacatattatggctgggtgttttccatttcaccaatcactgctcaaataaactcgttaacgttttaacattgactccctttaatatttaatagaagcggctgggcgcggtggctcatgcttgtaatcttagcactttgggaggccatggcgggcgtatcacttgaggccaggagttccagaccaccttccaccatggtgaaaccacttctctactagaaatacaaaaatttgccaggcgtagtggcgcaggtctgtaatcccagcttctcgggggccgggggggggggcgctgaggcacgggaatcgcttgagcctgagaggcagaggttgcagtgatcacgccactgcactccagcctgggcaacaaagcaagactccgtctcaaacaaacaaacatgtttaacaagagactgggagtctcacctgccacagctccttctacgcacacacgagtcggaattctgccctaatgacccgcctggcatccctgaacaatccgggaaatactcggcgctgcgtgcagagctgcccagggagctccagacacggcgccgcagggtccgggcgggacgccggggtcccggctgcgggcccagccgccatcttacggcgagaggggtctggggcggagctccgccagcggagactcaggttggcgacccgggagcggactgtggggaggccggtcccgccggtttcacagctcgctctcccctctcgggatgcccagccccgcacactcaccttttcccagcttccaggatgtcctggcatcttagctgtgcgtctcccagaacctgcagatcacagggcaagaggctgtgacagtcaccgggggctcccgaggtggaggacgtaaaacagcagagaccgatcccaagctgtggcgggagtgagatacaaaggccccaccaaatgccggaagccacgccctcctctccaactgggcggttcctgcgctagcgccactgattggataaagcaccagcactctctctccataccaaccccctcctctcagcattagtgcattttactgacaggaaaacaggctaaagtaggtagggtaaggtgcacagggaattacagctaataaagaagtgagctgagacttgaaatgcacttgctctttcccttacctgggtttgcttgtataatgcatcttatttactacttaagggtaagaaaaaaacatttggacttttttttttttttgtacctagtttcgctcttattgcccaggctggagtgcaatggtgcaatcttggctcactgcaacctccgcctcccgggttcaagcgattctcctgcctcagccttccgagtaactgggattacaggcgcatgccaccacgcccggctactttttgcatttttagtagagacagggttttgccgtgttggccaggctgatctcgaactcctgacctcaggtgatttgcccccctcagcctcccaaagtgctgagattacaggcgtgagccaccgttcccggcccatttggactttttttttgagacggagtatcgctctgtctcccaggctggagtgcagtggcacgatctcggctcactgcaagctccgcctcccgggttcaggccattcccctgcctcagccttccaagtacctgggactacaggcgcccgccaccacgcttggctaattttttttttttttttttttttttttttttttttttttttttttttttttttgtatttttagtagagacagggtttcactgtgttagccaggatgatctcgatctcttgacctcgtgatccgcccgcctcggcctctcaaagtgctgggattacaggcgtgagccaccgcgcccagccccatttggacattttaaaacaactttttaatcattttgataatgcagaaaaaacccagcactttgggaggctgaggcgggcggatcacgaggtcaggagatccagaccattctggccaacatggtgaaaccccatctctattaaaaacacaaaaattagctgggtgtggtggtgtgcgcctgtaatcccagctactggggaggctgaggcaggagaatcacttgaaccagggagtcagaggttgcagtgagctgagatcgtgccattgcactccagcctggctatagggcgagactgcgtctcaaaaaaaagaaaagaaaagaaaagaaaacaaaacaaaaatcctgagatggtgctgctggatatgagtgctggaaagggggagggaattaagagctgaccagatccctcctgactgccccgcagaacaagtggggggtggtgctgcactaaatgatgccctcccacagaagatgtatttgcattggttcaatgaatatacaatgcagagacctaaatgaagacacgtgaatgggtgtatgtggacatcagattgcagctgggaaacaggtgcctctcattctccccagcaagtgtggaaggtgtccatgcccatgagggtatagatctgtcattcttaacttgtatacaactctaggtcagttctgactcaatgacgtgcagatgagatttctcagatcatttgtatgtttgacattgtggctgctgcttttgctgccaccatccccaggcccaacctggcttaaagtccaggctttaggtcaaaacaatggagggcttcctgtgttctgggatgggaagttggagatctgtggtagggctgggggttggggtacactttagttttgtgcagaatgagagctgcagtggttttattaatcgtgatgattggcctggcctggttgtaactctgggcggggggaaggaatcagcattggttgttccccagatattcatgtgtccagccctggccttcctgccctcagacccagcaaaaagtaccaccacagactctgacttgcctgcctactccctgcaccccagatgggaataccttggaggccagactctgaatgtattattctccccattctaaccagacctgcctaacacacagtgagggagtgaagataggcagggtgagggacctggggagaaccagagtggaatcacaaatccttgggaaaagttaaagatacagcagtgggctgggctcagtggctcacgcctgtaatcccggcactttgggaggccgaggcaggcagatcacctgaggtcaggagttcaagaccagcctgggcaacatggtgaaacccggtctctactaaaaatacaaaaattagccgggcatggtggcgcacacctatcgtcccagctactcaagtggctgaggcaggagaattgcttgaacccggaaggcagaggttgcagtgagccgagatcatgccactgggtgacagagcgaaactctgtctcaaaaagaaaaaaaaaattgttctatctctcaaaattgagaagatgaccaatagggagaaattgttaaattaattataccctaaagctgctccctttcctgtttaattttagtcaatagttgttttttgttttacatagtaaactgaaaactaactggacatgtaaatagactgtacccattcttgtaccaaccactgtggtttggccaataaaaggatgtcaactgttcaaaccatgttcaaataaggcaaaccccaagctgtaatcaatctggctgtttctgtacctcactgccattttctgtatgtcattttgctttttctatccataagtctttttccaccttgtggctgtgcttgaagggggcctgcccctccacacctgtgggtatttctcgaaaggtggaaatgagagactgagaaaaaaaaataagacacagagacaaagtatagaggaagaaaagtgggcccgggggaccagcgctcagcatatggaggacctgcaccggcaccagtctctgagttccctcagtatttattgatcactgtctctaccatctcggtgaaggggatgtggcaggactatagggtaatggtggggagagggtcagcaggaaaacatgtgagcaaaggactctgtgtcataaataagtttaaggaaaggtgctgtgccttgatgtgcacataggccagatttatgtttgactttacacaaacatctcagtgcagtaaagagcaatattgccactagcatgtctcacctccagccttatggcgtttttctcctattgttgtaaccgagcgagttatagagaaatgccacactctgagactaattcaggagtcctttattgccagcaactgagagacggctagcgctcaaaattctctcaaccccgaagaaggggctagatttctttttataccttggtctaaaaggggagggggagtctagctgaagcaatttttacagaagcaaaacaggcaaaaagttaaaaaattgatggttacagagatagttacagaaaaataaacagttccaggtgcaggggcttaaactatcacaaagagataatgcaggggctttgggtaccatccaccgagcgcatccccaggagctgctggttcagcttgcctctatatcttatcagtaagtgcattcctggacgtgcttggagtcagcttgcactagttatgtccttaagggagggggataaggggggctgcaagtgaagaaacaaaaatggagtctgtctggctctctcagctaaaagagagtcaatccggttaaaacaaggtagggtatcacactatcttagtaaatagaatgtacgattgggttttacaccgagacattcgaatcctagggacgagcaggagacagatgccttcctcttatctcaactgcaaagaggccttcctctctcactaatcctcctaagcacagaccgtttacaggtgttgggctaggggacggtcaggtctttcccttcccatgaggccatatctcaggctgtctcagttgggggaaaccttggacaatgcacaggctttcttaggaagaggtccctgtggccttctgcagtgcattgtgtccctgggtactcgagactggagaatggtgatgacttttaccaagcatactgcctgcaaacatatttttaacaaagcacatcctgcacagccctaaatccattaaaccttgagtcaatacagcacatgtttctgcaagcacagggttggggctagggttacagattaacagcatctcaaggcagaagaatttttcttagtacagatcaaaatggagtttttatgtcttcctttttctacatagacacaataacaatctgatctatctttctttcccccacaatgctgaaatctctctgagcctactctggcttcacaggctactcgatttgcaaatcactctttgttcaattaaactctgttgaatttaatttctccaaagtttttgttttattttaaacattttcctcaaattttttctatcattaaaatgaataatgtgctcttgggctttgattttctaaattcatccctcagctattttcccaaattattttgtcctttcataatgcttctgcaattttttttttttttttttttttttgagacagtctcactctgtcgcccaggctggactgcagtggtgcaatcttggctcactgcaacctccacctcccaggttcaagccattctcctgcctcagccttctgagtagctgggactacaggcacgtgccaccatgcccggctaatgttttgtatttttattaaagatggggtttcaccgtgttagccaggatggtctccatctcctgacctggtgatttgcccgccttggcccaagagtgctggcgtgagccaccgcacctggctacatctgttttctaatcagtactgccactccctgggtttgtcaccttgaaaagatttgttcacttatattaacatcagttttttaactgtaaattgcattttattagtagagtttgaaaggtaaagtatttacaaggacataaaggcggtgagtttcagaaaaatctaataatatatttctttggttaaaaattctcatttacctatttctttctttctttcttttttttttttgagacaaagtctcactctgtcacccaggctggagtgcagtggcgtgatctcggctcatggctgcctccgcctcccgagttcaagcaattctcctgcctcagcctctgcagtagctgggattacaggcacctgccaccatgcccggctaatttttgtttttgtttttgtttttgtttttttttagtagagatgggtttcaccatgttggccaggctggtctcgaactcctgacttcaggtgatccccccacttcggcctcccaaagtgctgggattacaggcatgagccaccacacctggcctactttttttctttctttctttttttttttttttttttgagacaaaggctcactctgtcgcccaggctggagtgcagtggggcaatctcggttcactgtaatctctacctcccaggttcaagcgattctcctgcctcagccccctgagtagctgggattgctggtgcacatcaccacgcctgggtaatttttgtatttttagtagagatgggctttcaccatgttggccaggctggtcttgaactcctgacctcagtgatctgcccacctcggcctcccaaagtgctgggattacaggtgtgagccatggcacccggccttgcctggataattttttaatttttaatagagacggggttttgccatgtgggtcaggctgatcccagactcctgacctcaggtaatccatttgcctcaatctcccagagtgctgggattacaggcatgagccatggtgcccagactaaaaattctcatttttgctttccctgggtgaatttagaaattttctcagatgtgttttttttatggctgggtgatttccaacagaattccaaggcatagctattagaatgctagctaccaaggataaaataagggaaatctctcttctattttggctgcagaaaataaatacatttccacaagaaaatgtggtaggtaattagtgagtcacatagattcattaaaacatcagtttctctttttacaaggtaaattcgtgacagtgaatatttttgttgtatatcctgtgatttttatttctgagcttcatgctaaattttatgagataaaacttgaggccaggcacagtggcttacgcctgcaatcctagcactttgggagtccgaggccggcagatcgcctgagctcaggagttcgagaccagcctgggcaacatggtgaaaccccgtctctactaaagtataaaagaattaggcgggtgtggcatcatgtgcctgtagtcgcatctactggggaggctgaggcaggagaattgcttgaacctgggaggcggaagttgcagtgagctgagattgcaccactacactccagcctgggtgacagagcgagactccgtctccaaaaaacaaacaaacaaacaaaaacttggtacctcctagaaatgttcacatatgactaattgtttactacatgatttttcatgaaaataatgcaataatacatttattatctgaagggaatagatgcttttgctttccttgttgaggtatgaaatataagcaccttaaaatttcctttcggtggggcatggtggctcacgcctgtaatcccagcactttgggaggccgaggcgggcggatcacgaggacaggagattgagatcatcctggctaacatggtgaaaccctgtaataaaaatacaaaaaatattagccgggtgtggtggcacgtgcctgtagtctcagctactcaggaggctgaggcaggagaatcacttgaacccgggaggcagaggttgcagtaagccaagatcgtgccactgcactccagcctgggtgacagagcatgactccatctcaaaaaaaaaaaaaaaaaaattcctttttttacatgaaaatagtgtttgagtaattttgctagatttttcaaagattttcaaaaaccaagtgagtggctgggcatggtggctcatgcctgtaatctcagcactttgagaggctgaggcaggcggatcacctgaggtcaggagttcaagatcagcctggccaacatggtgaaaccccgtccctactaaaaatacaaaacagccaggcatggtggaaggtacctgtaatcccagctactcgggaggctgaggcgggagaattgtttgaacccaggaagcggtggtagcagtggctgagattgtgccactgcactccagcctgagcaaaagagtgagactccatctcaaaaaaaaaaaaaaaaaaaaccctctctctctctttgattgtcacacccaggctggagtgtgacaaaaacaaaactaataggtcaaattcagcatgcaggaagaagcacaggaaaatagagagagaaaagaaaaaagaagaaaaacaacaccaagttactctaagtactgtggaaataaactgaaagtggggttagagaaaaaaagaaagaagaaggtccaagtagttccaggtacttgggaggctgagatgggaagaccaactggacgtgaccagtgaatcacagtctgcatggacctgaatggtacaggcgccagtgagagccatctggtcgaccttagacatggcaagctgacagccaggtccaaagctcatggccaacatctctctcaaaataaataaacaaaaaaccaacagtaaattttaacaataacaaagaaataataacaagcaataagaccaataaataagtagaagtaaacaaacgtaaaaggtaattaatatcacaattagttgttctctctctgtttctcagtttctgtctttctgtttctctgtctctctctcccttgatctctgtgtgtcacactatcacacccaggctagagtgcaggtgtatggttacagctcactgttgattgcacacctgcactcaagccatgatgtgacagagtgagaagacctagctaaatagaaatatatataacatcaacttcagcatctaggaaggagcataaaagattttaaaaagagagagagagaacaaaggacacaaaagaaaaactacggcaactctctctaagtactgttgaagccaactgaaagtggggctagaaaaaaaacagaggaagaaggtttgagtagttttacatacttaggaggctgaatggaaagaccaccagggtgagactggggagatcaaggctatagggaatcacaatcacatccttcctttggacctgaaaagtactgccactggttatagctatctggtccacctgagacatggcaagctggcggccaagtccaatgctcatggctgaagtctgtctcaaaataaataaactaacaacagtaaatattcaacaataaagaaataataaaaaacaataataagacaaataagtgggagggaacaaagataaaaggtaattaatatcacaattaattgtctctctttctgtctctctctcccttgatctccatgtgtcacagtttcacacccaggctggagtgcacatgtgtggtcacagctcattgctgatcactcacctgcactccagccagggcgtgacagagtgagaagacccagctaaaaaaaaaaaaaagaaatctaaaacatcagtttcagcgtgcagaaaggagtgtaaggaaatgaaacaaagagagcaaagaacaaaggagaaaaaccacagcaactccctctaagttctgtggaagcaaactgaaagtggagttggaaaaagaacagaggaagatccaagcagtttcaggtacttaggaggccgagatggatgggaagaccacctgggcaagaccagggagatcaatgccacaatgaatcacagttgcatctctttccagccatgctcagtggctcacgcttgtaatcctggtactttgggaggccgaggcgggtggatcacgagatcaggagatcaagaccagcctgaccaacatggtgaaaccccatctctactaaaaataaaaaaaaaattagctgggcgtggtggcgggtgcctgtaatctcagctacttgggaggctgaagcaggagaatcatttgaaactggaagggggaggttgcagtgagccgagattgcgccactgcactctagcctgggcaacaagagcaaaactccatctaaaaaaaaaaaaaattgcatccctctgccttacctgagtaatatgagcaatactgctgccggtgagagctatctggctgaccttagacaaggcaagctggcggccaggtccaatgctcgcagctgacaactgcctcaaaattaataaacaaatgaccaacagtaaataataataacagagaaatgataatgaacaataatatgaccaatcaataaataaataaatgggagtgaacaaaggtaaaaggtaattaatatcacaatttattgttgtctctctctgtctctatttctctgtctgtttctgtctgtctgtgtctctgtctgtctttctgtctctctctttgatctctgtatgtcacactgtcaaacccaggctgaggtgaaggtgtgcagtcacagctcactgctggtcatgcacctgcactccagccagggtgtgacagagtgagaagacctagctaaaaaattatatatgtgtataaaacatcaacttctgcatgcaggaaagagcgtaaaaaaaattaaaaaaaaaagagagacagcaaagaacaaaaagaaaaactacagcaactctctcaaagtactgtggaagcaaactgaaagtggggttagaaataaagcagaggaagaaggtctgagtagtcccaggtactcgggaggccaagatgggaagatcagccccgtgagactggggagatgcaggctgcagtgaatcatgatcgcatccctctgctggacctgaatggtactgctgccagcaagagccaaatggtcgaccttagacatggcaagctggcgaccaagtccaacactcgtggctgacatctgtcataaaatgtataaacaagaaaaccaacaatatatatattttttgagacagagtcttgccctcattgcccaggctggagtgcaatagtgcaattttgtctttccgcaacctctgcctcctgggttcaagcgattctcctgtctcagcctcccaagtagctgggattacaggcatgcgccaccacgcctggctaattttgtagttttagtagagatggggtttctccatgttggtctggctggtctcgaactcccgacctcagttcatccacctgcctcggcctcccaaagtgctgagattacaggcatgagccacctcgctcagcccataaatatttaaaaataacaaagaaataacaataacaagaccaataaataagtaagtgggagtgaacaaaggtaaaatggaattaatatcacaactaattgttgtctttctgtctgtctctgttttggtctctctgccactgtctgtgtctctgtctctctgtctatccctctctccatcaatctctgtgtgtcacactgtcacacacaggctggagggcaaggtcacggtaatgactcactgctgattgaacacctacactccagccagggtgtgacagagttagaagacctacaaaaaataaaattaaattaaacatccatgtcagtgtggaggaaagaaggtagcaaaaaataaaagaaaaaaagaaacagagcaaagaacaaagaataaaggccacagcaactccccctaaatactgtggaagcaaaatgaaagtgggggtagaaaaaaaaaagtaggaagatggactgtgtagtcccaggtaaatgggaggctgagatgggaaaaccttccggatgagaccacgaagatcgttgctgcattgaatcatgattgtatccctctgctgggcctgaacaatagtgctgccaatgagagccatgtggtcaaccttgacaccagcaagagccatcagtttgaccttagacatggtgagctggcgactaagtccaacactcgcagccgacatatgtcacaaaataaatatacaaaaaaaaacaacagtaaatatttaacaataactaagaaataataacaaacaatattaaagactgttgggaacaggctcccaaatctggccataaacaggccccaaaactggccataaacaaaatctctgcagcactgtgacatgcttgtgatggctatgatgcccatgctgaaggtttttggtttaccagaatgagggcaaggaacacctggccaacccagggtggaaagccgcttaaggcattcctaaaccatgaacaatagcatgagcaatctgtgccttaaggacatgttcctgcagcagataactagccagagcccatccctttgtttcccataaggaatgcttttagttaatctataatctatagaaacaatgcttatcactggcttgctgtcaataaatatgtgggtagcactctgtttgtggcggtcagctctgaaggctatcagccccctgattcccactctgcactctgtatctgtgtctgtgtctttaattcctctagcgccactgggttagggtctccacgactgagctggtctcggtaaaagaccaataaataaatgagagtgaacaagggtaaaaaataattaatatcacaattaagatattcttctctctctctctctgattatcacactcaagctggagtgtgacaaaaataaaaaaaatctaagaggtcaacttcagcatgcagaaaggaacatagaaaaatagagaaaacaacaaagatttaaaacaacagcaagtcactctaactactgtggaacaaactgaaagtggggttagaacaaaaacagaggaagtaggtcctagtagttgcagggactctagaggctgagatggaaagatcacccatgtgagaacaagactgaggctacagagagtcataatcacatcactctgctggacctgaaacagtatggccaccagcgagaaccatctggtcaaccttagacatggcaagctggcagctaagcccaatgctcatggctgatatccatcagaaaatatataagcaaaaaaaccaacagtaaatatttaacaatatcaaagaaataataacaaacaatactaaacaccagtaaatcaataagcaggagtcaacaaagataaaaagtaattaatattacaagtaagatcttcttcactctctctctctctctctcttcatttgtcacacccagctggagtgtgacaaaaaaatctaaaaggtaaacttaagcatgtagaaaggtatgtagaatagagagagaaagaaaacaagtaaaataacagcaagtcattctaagtactctggaaacaaactgaaagtggggttagaaaaaaaaaaaggaagaaggtctgagtagtcccaggtactcatgaggccgagatgggaagaccacccaggcaagactggggagatctcgatcacatccctctactggacctgaagggtactgccacaggtgagaaccatctggtcaaccttagacatggcaagctggtggctaagaccaagggtcatggctggcatctgtctcaaaattaataaacaaaaataccaacattacacatttaacaataacaaagaaataacaatattaaggaccaataaataaataagtgggagtgaaaaaaataaaaggtaattaatatcacagttaagatttcctctctctctctctctctccttttgtcacacccaggctggagtgtgacaaataaaaaataacctaaaaattcaactgcaatgtgcgcaaaggactataggaaaatagagaaaagaacaaacaagaaaaacaacagcaagtcactctaagtactgtgggacaaactgaaagtggggttaggaaaaaaaaaaggaagaaggtctgagtagtccaaggtactcaggaggctgagatgggaaaaccacctgggtgagactggaaagatcaaggctgcagtgaatcaggatggcatccgtctgctggatctaagtgggactgctgcttgcaagagccatctggttgaccttagacatggtgaaacatgaggcatctggaggaccttagacatggcaaggcaagagccatctggttggccatagacatggcaatctggtggctaagcccaatgctcacagccgacagctgtctcaaaataaataaacaaaaaacccaacaataaatatttaacaataacaaagaaataataacaaacaatattaaggaaaataaatgagtgaaaaaggtaaagaggataataaatatcacaatcaatattatcccctctttttttctctctttctccatttgtcacacccacgctggagtgtgacaaaaaaaaatagttaacttcagcttataggaaggagtgtaggaaaatagatagagaaagaacaaagaagaaaaacaacagcaagtcactagaaatactgtggaaacaaaccgaaagtggctttagaaaaaaagagaaagaagttccgagtagtcccaggtactcaggaggctgagatgggaagaccacgcaggtgggaccaggaagactgaggctgcagagaatcatgatcacatccttctgctggacctgaatggtattgccacttggcaagagccatgtggtgaatcttagacatggcaatggaggagccatcttgttgacctcagacatgtcagggcaagaaccttctggtcctgcctccagtttccctctccaaaatggatttatgttttaatatatttaataattctaatattgaaataactttatttagtttttattcatcaaaaatactaattttctgtataattaatggttagatttaatttaattagatttaaatgagaaattgccacaatcaaaactttttaaaagtacaactgtattttatagttataaaatgtacaaaatatgcaaaaattaaaaataaatttgtgacatattaaagtgtatctgtgtctgtaagattgagaaacatagtggataagcacattgtctactcctgaaactttctttttataatgaggtgactttagaaatgtcattcagccttcttttgtttaatatctcctcacctgtaaaaagggaacaataaagcacgttgtagatttatgataaaaatacatgtaaaacttgttatagtattctagagtagtactataatatagtgggaatatatgtttttctttttagaacaaaactgttacaaaaaaaggggttcaataaaatatttctgagttggaaacaatggcaagtatacggcagaatgttttggtttcctccataaagcagacgtcatctgtccatgaaagatctcctcacttggaatgaaattataagtcacttgaaaataacagattgtctccagtaatatagcagtaggaatgatcttatctcagaccatagttaaatagctgggattttttgtttcttggcatcagagttttctttatttaccacatgcacattatgatccacagatttgattctcaagcacctgactatggccaactccttggtactctctaaaaaaagtcctttagatgatgactgatttggagttgaaatattttctcagtaatattaaatagaaagtgttttctatgttcagagagtggccagagcatgtgcattgacaccatctgcctcttgagtatctcccaggccatcaccatcagccccaaaaacctcatgtgggcatagcttaaactacatgattccaaatatatttgaatctctaatatccaaattatgtgctgaattctgaataggcttataaatgtcatttttcctatgtatgttactggcaaatggaacacaataaacaacacaaaaattatttaaaacactgttctggagtagttaataacagaattccacatttatcacatgttgtgcttttattattttttaatgttttgtgtttggaacttttaacctgggccagcagctccatgacttttatcctgttcaacacaagtagtggggtccaacacattcataggtccaacaccactcctaaattctcacctgagtccacagtcacccaaaacatctttgtcctaaggagcacctttgtattattttacactctcttctacatcttttcagtatatacgttttttttaatttttttatttttttattttttagtatttattgatcattcttgggtgtttctcagagagggggatttggcagggtcataggacaatagtggagggaaggtcagcagataaacatgtgaacaagggtctctggttttcctaggcagagggccctgctgccttccgcagtgtttgtgtccctgggtacttgagattagggagtggtgatgactcttaacaagcatgctgccttcaagcatctgtttcacaaagcacatcttgcaccgcccttaatccatttaaccctgagtggacatagcacatgtttcagagcacggggttgggggtaaggttatagattaacagcatcccaaggcagaagaatttttcttagtacagaacaaaatggagtctcctatgtgtacttctttctatacaggcacagtaacaatctgatctctttcttttccccacatttcccccttttctattagacaaaaccgccatcgtcatcatggccctttctcaatgagctgttgggtacacctcccagacggggtggcggccgggcagaggggctcctcacctcccagacggggcggctgggcagaggcgccccccatctccgggacagggtggcagccaggcgggggctgcccccacctccctcccggactgggcagctgctgggcggagacgctcctcacttcccagatggggcggctgccggatggaggggctcctcacttccccgacggggcggctgccgggtggaggggctcctcacttctcagacggggtggccgggcagagacgctcctcacctcccagacggggtggcggtcgggcagggacactcctcacctcccagatggggtggcggtcgggcagaggtgctcctcacatcccagacggggcggccgggcagagacgctcctcacttcctagacaggatggcagccgggaagaggcgctcctcacttcccagactgggcagccgggcagaggggctcctcacattccagacgatgggtggccaggcagagacggtcctcacttcccagacggggtggcgaccgggcagaggctgcaatctcagcactttgggaggccaaggcaggcggctgggaggtggaggttgtagcgagcggagatcacgccactgcactccagcctggtcaagattgagcactgagtgagcgagactccgtctgcaatcccggcacccggggaggcccaggcgggcagatcactcgcggtcaggagctggagaccagcccggccaacatggtgaaaccccatctccaccaaaaaatacaaaaaccagtcaggcgtggcggtgcgcgcctgcaatcccaggcactggcaggctgaggcaggagaatgaggcagggaggttgcagtgagccgagatggcggcagtacagtccagcctccactcggcatcagagggagaccatggaaagtgggagacgggagagggggagggggagggggagggggaaggggagggttcttttttataatccaagttgttggcttatgaaaaactctaaactgatcactgcttgttttttctatagtcaggtccattgttctcataagccatgaccccagaatatccaggataacctcttcctgctatggaaggaatatacagtttcctaagatgatcacatagatctacattttatgtggaattatttttttaatgtgcagaccttcattcattattttatgcagaggtttaattaccacaaagagcagtcacatatcagagaacccatgagtcaccgactgagtccctgccctcatagaatttattatatggtagcaatgacagttacagactaaatgttttgaatagttctttgataattttctatttactaaatgttataataaagaaatttagaggccaaaattttattttaaaatggggcctctagtaatttggagacattggaaaacttatatgggtatgtagctttaaactaattaatttaaaacgtccactgggagctgtggctcatgcctgttatctcaacactttgggagtctgaggcaggtggatcacctggggtcaggagtttgagaccagcctggccaacatggcgaaaccctgtctctactaaaaatataaaaattaggtgtagtggtgtgtgcttctaatcccagctactctggaggctgaggcagaagaattgtttgatcccgggaggtggaggttgcagtgagccaagatagtgccactgcactccagcctgggtgacagagcaaggctctgtctcaaaaaaaaaaaaaaaaagccataaccggttcataggtacatcaagatggtagaatagaaggcttcaccaaccttcccccctgtaaggacaccaatttaacaacaacctacatttaaaatcaccttcataagaaacaaaaatcaggtgagcactcatggtacctggttttaacttcatattgctgaaagaggcactgaacgggtaggaaaaacagtcttgaatctcttacactatttctcccacatcccccaacaatggtggcatggtgcagaaagggagagttcagcaattgtgaggcattgaattcagtgctttcatgttataacagaaagaaaaaccaaacaaaactcagcttacacctgctgatggaggaattatttaaaccacatagttaaatacagttgctggtaatagtaagtacacagaaaatcaaataatattataacactgtaactgtgatgtatgaactactcttatgcaaggtagaaagactaaacaataaaccaatcaaaaataacaactacaacaacttttcaagacatagacagtaaaattacatataaatagaaacaacaaaaagtaagggaaaagaattaaagcatagagattttattattctttttgcttctttgtttattcaaacagtgttaagttgttattagattaaaataataggttataagatagcatttgcaagcctcatggtaagctcaaaccaaaaaacatacaaggaatacgcaaaaaataaaaagcacaaaactaaatcatatcaccagagaaaactaccttcactaaaaggaagacaaaaagcaaagaaagataaaagagaagaccacaaagcaaccataaatcaaataaaatggcagaagtaagttcttgcttatcaataataacattgaatgtaaatagactaaactctccagtcaagacagaggggatgaatgtatataaaaacaagacatatttatcctttgcctgtaagaaattcacctcatctatgaagacacacatagactgaaagttttagaagtggaaaaagatattcaatgtcaatggaaacaaaaaaaatgcggtagtagctatacttaaacattagaaaaatagattttaagacaaaaattataagaaaagacaaagaggttactatataatgataaaggggtaaagttaacgagactataacaattttacatataaatacacccaactcttgagcactgaaatatgtaaagcaaatattattagagccaaagagacagatagactccaatacaataatagctggagactccaacactccactttcagcattgaattggtattccagacagaatatcaacaaagaaatgttggacttaatctgtgctatagatcaaatgtatctaatagggatttagagaacatttcatgtaatggttgcagaatatacattcttttctttagcacatggattattttcaaggatagactatatgttaggccacaaaacaagtcctaaaacattcaaaaacttgaaataatatcaaatatcttatttgtccacaatggaataaaattagaaattaataaaaagaggaattataaaaactatacaaatacatgaaaaatcaacaatatgctcctgaatgatcagtgggtcaatgaagaaattaagaagaaaattaaacattttcttgaaacaaatgataataaaaacactacgtatcaatatctatgggatacacaaaagcagtactaacaggaaagtttataggtataagtgcctacatcccccccccaaaaaaatctcaaatacacaacctaatactgtatcttagagaactagaaaagcaagagcaaaccaaatctacagttattagaagaaaaaaatcataaagattagagcagaaaaaaaattgaacaaaaaatacaaaagatcaatgaaaaaattggcttttttgaaaagttaaaaattgacaaaccttcaacaaactaaaaaaaattttaaatccaaacgtaaaataatttaacaaacaaataaactatgatacaagagggcaaatgagtgaggcctacaggctccagggcaatgtaagagacctcagaagcctcctgtgcttccttgtttgcctccactgttctgaggtatccagttaactcacaagttcatcatcccagcctggaaaatgactctggttccacttccaaaaaagaaccccagagctatgacagggatggtcttcagagcagtgatctgatgctctgccacattctacactagcctgagtgctcagtcccacaaacccccaagcaaatttctgctctgaaaggcctccagaggatatggagaaatttccaaggatctgagagtacagtgggtaattgatagacagcaaggtcaactcacctttttgagcgttcgaaatttagatgccacccaggtcaattacttcaatttacagagaaaaatttgaggtttttcactactgtattccccttcatactgtgtgtagggggattactcccaattttaattacacagagcaatgaatgcagaaactaagtttttgtcctctaaaagctttcctggggatggccacagaacaggcagatccatgggaaccttgaggttcccaagtcatcagcctgttatcttttctcctccccatgttataggtcctgggcatgttacccaggagactgggtgcccctaccccgtggcagagctgccctcatcctctgtcttcttgtcactccatcagtgttaactgctcttctgacctttaacctgagaagtctgtgtgtgtgtgtgtgtgcacgctcatgcacggaaacctgtgcaagtttaatggtgcagatatgagtgtgctccatacgagaaaattggcagaaattctcaagatctcagggactctcattctcaaagcaaaccccgtgatagcgatgagccctggcctatgaggtcagaatgctcttttatcctctggactctgccaactttatgttctctgggccagtctctgcttctctccagacctcagtttcccagttatccagtgagatgttagatgtcaaagtgtttaagccacagctcagcatgcacacggtgcaagctccctaccaactaggatgggtgtagcagggctgtgatcagggtgtacccagatcttcctcagttggacagaaatagatgagttctgcactgggcagctggaccttctgtccaaaaaaggtcacgcgcacaggatccttcaaggaccacagacaatgtgcgcatatgagacccacctttatcccccagcagctcccactggagcatacccaatatgtcccctgtcctctgcatctagaaagtggtgacatcctcacttaacacatggactgatggaccctttgtggtggagtagtcccacaaagagaatctgagatgctattaactgtacaaggaactatggatgtgggccatatgaaggcactagaacttcagaattaaatcttccccactcctgcctccaccactatgcagataaaaaaatggtccttggaaagtgatatgtcttaccgaagattaccagggattccatgtcaaagctagcactttggttaggattacatttgcctataagtagaaggatgcccaatataacagtagtgcagacaagatacagaatgctttctttctcataaataagaatcttagagctggacagtccatgactctggactgtgcaccaaggcagtcaaaaattatctttttgctactttttttttctttttctaacttttaagttcaggggtacatgtgccggatgtgcaggtttgttacataggtaaagatgtgtcataaagattggttgtacagattgttttatcacccaggtattaagcttactatccattagttattttttctgcttctctccctcctcccactcttcacctcacaatatgccttagtgcatgttgttcccctgtatgtgtctgtgtgttctcatcatctagctcccatttataagtgaggacttgcagtatttggttttctgtacctttgttagtttgctaaagacaatgacctccagcttcatccatgtctctacaaaggacatgatcttcttctttttttatggctgcacagtattccatggtgtatatgtactatattttctttatccagtctatcactgatgaacacatggattgatttaaggtatttgctattgtgactagatctgcaatgaacgtgtgcgtgcatgtgtctttataatagaaagacttatattcctttgggtatatactcagtgatgagattgctggggtgaataatatttctgtctttaggtctttgaggaatcatcacactgtcttccacaatggttgaactcatttacactcccaccaacagggtaaaaatgttcctttttctccacaactttgccaacatctgttattttctgagtttttaataatagccattttgactggtataaaacagtatctcattgtggtttggatttgcatttctctaattattggtgatgttgaggttttttcacatgctttattagctgtgtgtatgtcttttgagaagtgtctcttcctgtcctttgcccactttttaatggggttgtttgcttttttcttgtaaatttaagttccttgtagatgctggaaattaaatctttgtcaaatgcatagttcacaaaaattttctcccattctgtatgttgtctgcttactctgtaggcattttttttttttttttttttttgctgtgcacaagctcttcagtttaattagatcccatttgtcaatatttcctttgttccaattgtttttggcatcttcatcataaaatattagcccatgcctacgtcctgaatcgtattgcctaggttgtcttccaaagtttttatagttttgggttttatatttaagttttaaaccatcttgacttaattattgtatatagtgtaaggaaggagttcagttctttttttaaattttactttaagttccaggatgcaagtgcagaacatgcaggtttgttacataggtatacatgtgccatgtggcttaccgcagcaatcaacacatcatctaggttttaagccctgcatgcattagctatttgtccttatgctctccctcttctcgccccccatcccctgactagccctgatgtatgttgttcccctccctatgtccatgtgttatcattgttcaacttccacttatgagtgagaacatgtggtgtttggttttctgttcctgtgttagtttgctgaggatgatggaggaagggggtcagtttcaattttctgcatatggctagccagttatcccaacaccatttattgaatagggagtccttttcccattgcttgtctttgtcaggtttatcaaaaatgagatagttgtagatatgcggtcttatttctgagttctgtattgtgtttcattggtctatgtctgttcttgtactagtaccatgcttttttggttactgtagcaccttagcatagtttgaagttgggtagtgtgatgtcttctgctttgttctttttgcttaggattgtgttgactattcaggttctcgtttggttccatatcaattttaaaatacatttttcttgttttgtgaaaaatgtcagtggtagtttaatgggaattctattaactctacacatttacttgggcagtgtggccattttaacaatattaagtcttatatcatctttgtttttttttttttttgagttggagtcttgctctgtcacctaggctgaagtgcagtggtgtgatcttggctcactgcagcctttgcctcccaggttcaagcgattctcctacctcagcctcctgagtagctgagattacaggtgtgcaccaccgtgcttggctcatttttgtatttttagtacagatgtggtttcaccatgttgctcacgctggtctcgaactcctgaccttgtgatctgcccacctcagcctcccaaagtgctgggattacaggcatgagccaccatgccctgctctgatttctttgagtagtgttttatagttctccttgtagaggcctttcacttcctttgttagatgcattcctaggtgttttattctattcatggtgattgtgaatgggagtttattcaggattttgctcttggcttgattgttgttggtgtataagaatgctagtaggccgggtgcagtggctcacacctgtaatcccagcactttgggaggccgaggtgggcggatcatgaggtcaggagatcgagaccatcctggctaaggcagtgaaaccccatctctactaaaaatacaaaaaattagccggcatggtggcgggcacctgtagtcccagctacccaggaggctgaggcaggagaatgacgtgaacccgggaggcggagcttgcagtgagcaaagatcgcgccactgtactccagcctgggaaacagagcgagactccgtctcaaaaaaaaaaaaaaaaaaaaaaaaaaaagaatgctagtaatttttgcaccttaatttttcatcttgagactttgctaaagatgtttatcagcttaagaagctttggggctgagacgatggggttttctacatgtaggatcatgttgtctgccatcaggcatagtttaactccctctctttctatttgaatgccttttatttctttctcttgcctgattgctctgaccaggactttcaatactatcttaaataggagtggtgagagagggcatccttgtcttgtgccggttttaatggggaatgctttcagcttttgccctttcagtatgatgttgtctgtgggtttgttatatatggcttttattattttgaggtatgttttttcaatacctagtgtattgagagtttttaacatgaatggatgttgaattttattgaaagctttttctgcatttattgagataatcatgtggtttttgtctttaattctgtttatgtgatcaatcacatattgatttgtgtatgttgaaccaaccttgcatcccatggatgaagcctacttgattgtggtggataagcttttttacatactgctggattttgtttgccagtattttgttgagaatttttgcatcaatgttcaccaagaatattggcctgaagttttctttttgtgtgtatgtctctgccaggttttggtaccatgatgatgctggcctcatagaaagagttaggaaggagaccctctgtttcaattctttgaaacagtttcagtgggaattttaccagctcttctttgtaaatttcgtagcattcagctgttaatctttttggtcctggggtgtttttggttggccggctctttattattgcctcagtttcagagcctgttatttgtcttttcagggattcaatttcttcctagtttagtctcgggagggcatatgtgtccaggaatttatccatttcaactagattttctatcttatgtgcatagaggtgtttataatattctctgatggttatttttatttctgtggagtcagtgataatatcccccttattatttctgattgtgtttatttgaatttttgatcttttcttccttattagtctatctagtggtatatctatattattagattttttaaaacaaacaaacaaacagctcctgaatttgttgatcttttgaatggtttctcatgtctctatctcctttagttcagctctgattttggttcttttttttttttttttttttgagatggagtcttgctctgttgcccaggctggagtgcagtggcacgatctcagcttgctgcaagctccgcctcccgggttcacaccattcgcctgcctcagcctcccgagtagctgggactacaggcacctgccactatgcccagctaattttttgtatttttagtagagacagggtgtcaccatgttagccaagatggtcttgatctcctgacctcgtgatctgcccacctcagcctcccaaagtgctgggattacaggcgtgagccaccatgcccagtgattttggttatttcttgtcttctcctagctccaggatttctttgctcttgtttctctagttattttagttgtgatgttaggttgtcaacccaagatctttctagatttttgatatgggcatttagtgctataaattttcttcttaacattgccttagctgtgtcccagagattctggtatattttgtctttgttctcattagtttcaaagaacttcttgatatctgccttaatttcattatttacccaaaagtcattcaggagcaggttattcaatttccatggaattgtatggtttttagtaagtttcttagtcttgagttctaatttgattgtactgtggtctgagacattgtttattatgatttcagttcttttgcatttgctgaggagtgttttactatgtgactatgtgaccaattttagacaaagtgccatgtggtgaagagaagaatatatattctgttgttttggggtggaaagttctgtaaatatctttcacatccatttgattcagagctaagttcaggtcctgaatatctttgttaattttctgtctcaataatctgtctaatattatcagtggggtgttaaagtctcccactattattgtgtgggggtataggtctctttgaagacctctagaaacttgttatagaaatctggttggtcctgtgttcagtgcatatatatttagtatagttagttcttcttgtttaattgaaccctttgccattatgtaatgcctctatttgtcttttttgatctttgttggtttaaagtctgttttgttggaaactaggattgcaacccctgcttttttctgttttccatttgcttggtaaaatttcgtccatttctttattttgaggctatgtatgttattgcatgtgagatgggtgtcttgaagacagcataccagtgggtcttggttctttatccacttgccactctgtgtcttttaactggggcatttagtccatttacatttaaggttagtattgtaatatgtagattcaatcctgtcatcttgatgctagctggttattttgcagacttgtttatgtggttgatttatagagtcactggtctgtgtacttcagtgtgtttttgtggtggctggtaataattttttctttccaaattagtgcttccttcaggagctattgaaaggcagatctggtggtaatgaattacctcagcatttgcttgtctaaagggaatgttatttcaccccagcttaggcttagtttggcaagacatacaattctgagttaaaatttcttttctttaagaatgttaaatattgacccacaacatcttttggcttgcagggttttaactgagacgtctgctattagtctgatgggcttccttttgtaggtgacctgacctttctctctggctgaccttaacattttttcttttcatttcaatttcaactttggagaatctgatttttatatgtcttgggtatgatctgtctatggagtatctcactggggttctctgcattttctgaatttgaatgttggcctggaaagcaagattggggacattctcatggatgatattctgaaatatgttttccaaattagttccagtctccccagctctttcaggtacaccaatcagttatagatttggtctctttacataatcccatttttctcagacctctgcttggtctattctgctattaatacttgtgattgcattatgaaattattttattgtgtttttcagctctaccaggttgattaggtacttctctatcctagctactttgtttgtcagctcctgcaatgttttattataatttttagctttcttgcattgagttagaacatcctcctttagctcagtgaagttcatttatatccacattctgcggtctacttctgttatttcagccatgtcagcctcagccccattctgaacccttgctgaagaagtaatatggttatttggagaagggagggcactctggcttcttgagtttttagtattcttgtgctgattctttcttacctttgtgtgcctatctacctttaatctttgaggttgctgacctatgaatgggagtttttgtttgtttgtttgtttgtttgtttttaactatttggccattctttgtagagctgctgcagttagttgggcatctgccccagttcctagttcttggatttttcagtatctggaggtatcaccactgaaggctgtgaaacagcaaatatagcagcccactctttcccttgggagctccatccccaggggaggtgcagacatgttgctggcccaaacacatctggaggaggcgactggagatcccagttagaaggtctcgcccagctaggaggaacagaattggggacccacttaaagaagcagtttagccccactttaatagagcagccatgctgtgctggggtaccatttttgcccctcatcagggtgggctctcccaagcctggaggctgaaacagctacattgcaaaacagcaaagatgttggcccaaccctctctctaggaactatgccccaaaatgttttcaaacctctgttgcccagagaacatcagtgggagtagctggaggctctggttgggaattatctctcagagatgaggagcatatcatagtcccgcttaaagaagcagtctagtcacattatggtagagccactgtgctatgctgggagattccttctgtcccttgatgatttggtctctcctaagcccacaggctagaatggctgagttgtccaaacaccaaatacggtgtcccactccttccactaggcactgcatcccagagagaaatcaaatccctgtctgccagagaatatgggaggggccggctggagtccctgataggaggccccaccctgagacaaaaaatgtgtcagggttccacttaaagaagcagtctggccacattttggtagagccactgtgctttgctggaggtttctttccataggctgtcagttttgtttggactttcctaaacccacaggctggaatgactgagtcatccaaacagcaaatatggcagcctgcccctgcctccaggaactctgacccatcccaggtagatgcaatgccattgctggggagtggctggaattcaaagccagtgggtcttatcctgtgaagctctatgaaagtggggtccacagactgatgctgctcagccccatggattcagctttcttcctaggggtgtttacagaggtccaaattcttgcattttctgagtagctttcacctttgccagagatcccggagccagagtatctaaggctcctgagattctgtttgtgcctgagtagttgctctgccaagaccatgcagctctgtgtgtcagaccaaaagccctggtggaatgggttcaagagaaaatctcctgacccaaggatggcaaagatccatggaagaagtgtggttttccaggatcacacagtcactcatcacttccctgggcagggtagtttcccttggctctgtgtcattcatgagtggtcagtggccctgtcctgctttcctccattctccatgggttgagctgtttccttcatgagtcccaaggcaaatacttgggtgtttcagttgaagatgctgcatttactctcttcttgttcctttccatgagagccacacatcgtagctgcttctaatcaggtatctcagcatccttctctgctacaatattttggtagatggtttttatgctgtaggctgtctcatggcccaagatggctgtaggagcaccagcctgcaccaaccaccatgtgcatttcaaagagcaaaggaggagaaaaggtgcaaagtcaaagtgactcacacagctgtgttagcttcaactaaggagtctccccaaagttccatcaatacttctgcttacacccaaatgtcctgaacgtcctctagtcattgtcagcttcaataggggtcaagaactatagtttttgtgtctggtaacttgctgtttgaatgaaacagaatctctctttttaagaatgaaagaaaaataaaaactgtggcaatgaccagtgctcttttgctacactaaattcaaagataaagagaagaagatggagttattctcaggtgaagtgggcacttattttccaaacaaagcctcttttactgtttatttattttcagattagatgggaaaaagtcttcattctgacaagcactccctttatgaccaaaggttagtcaagcttaactgaaccttctttttgactaagccaaccttgacttactaccctactcctggtttgagaagctcattttcagaaatcctgctaagattgcttagtaagaatccacatattctttacagcttctgaaaacttaattccccttccttgatatttaagtcgttagcctgcctgtagccataatcctgttggaaaacaatctctcttcttttggtattttatcaaatttctctcagtaattttttatccactgatctattctttctattgactataaatcctgagttgtctgtgttcagagttgtgatcaatttttgaatcctattaaaatggccataacatctactgcaatagtattaaagtctttctttccaatttttaacaaatgtcagaattaatttatttgacagttgcccaataggatgtttgagtataaaaccagttttcagttccaagaaaaatgatgtggataatatgtagttgtatctgcaagtgtatctgaaaaattatcttctttttcaagtggggtgtgggtgaaagattatggagccaacatgttcctaaaatgctgagtcataattcaaaccatacaaatcaaagaggtagaatgcttggaccccaacatttttaaccttgaggatactttgatgcccatgctcaaaagtattgtgaaactggcggggtgcggaggctcatgcctgtaatcccagcactttgggaggccaaggtgggtggattacctgaggttgagagttcgagaccagcctgaccaacaatggagaaactctgtctctactaaaaatacaaagttagccaggcttggtgatacatgcctgtaatcctagctacttgggaggctaaggcaagagaatcagttgaacttggtggatggaggttgtggtgagctgagattgtgccattgcagtccagcctgggcaacagagtgagactctgtctcaaaaaaaaaaaagtatttttttgttgctcctatgtgtgagcaagaaatttactaaaatcacaactgtcattcaatgccaagtcaaaaatgtttcttttcattccgattaatatagaaacagagataaactagctttaaaggcactaaccaaaattgaaaatgctgactaattccatttaaagcttacatcttttcaggaactgtttatttttgaacatgtgacattggaacacaattttgtaattggtttggttgactgaagaagtgacttcttgaattggggtagaaaagccaaggtctgtaaattgaagatagactgcaatattgaaagcaaatttcagattcctttgcacactttaacttgaaggttaacagatataatatatgtagataaacacatacaaacacatacaatatataaatatatctatgtaatgtccatttatgagtatgtcttataaaaaaaaaggtaagtcagagatcatttccctacttattcttctcaggggaggtgaatacaagcaacccacttactcagccctgattatttcaatcagccaattagctcagcccagtgtattccaattagccaattaatttggtctaggtaattctgatcagccaattagctcagatcaggtaaatccaatcagtcagttacctcattctaggtgatttcaatcagccaattaggtcagcacttttgatttcaatcagtcaattaactcaaatcaggtcattacagtcaattaaccaatcccaggagattaaaatcagccaattagtttagcccaggtgactccagtcagccgatatttgagcccagatgattttaactggccaataagctcagcccagctgatttcaatgtcagttagctcagcccaggtggattcaatcagccagttctctaaatttcaactgtagattaatcaagactggcccccagtggtgcatgagaatagctcatgcatacactgagaaggaaagcaaggtccagaaatgttaacctgcacagaaagtgttacatgactttactatcagcttatttcccaaaccttgcccctgaaagtgaagctttgtctatacaaaaaacattctatacctatgttccattctgacatgctactgagccagagaagagaaataattctacatctgcacccttagaatatgctaagatactgaaaaatgtctttggaggaacaatttttgtgtacatatttacatagaaatactcatataatcttgtatatgtatcaatctttgtatatacattcatacagaacaaagatgtagaaggtggaagaattaataggtactggtaccaatagtaatgcaaatagaaactaggatctcacacatggatcaagtcaattgttgagactacgactcatctatttggatccaacacacaggtgttgactctcatacctagaacccggacctgtgtgagattgttaatctcattattggaccttcctgcaggtgtgattgtgatatatgcaccttcacagaaccttcatgatttgacacatctgcctgggcccagcccagatggaattgtgacatatcactggactcagcccctaggtgatattaccctattcttctgctttagcgctgctcacaggggaattgtaacgtatcaccgggccttatatccaggtgatgtgaatcttctgctttgtcgctgcccacagggggcatttcaacatataactgagccctacacccaaatatgtgactcccttgtctgtgtctggcccatatcagccattgtgacatgttgcttggtctaacacccgagttatataactcttgtgccctggccctgcctacagagagcattgtgagatatctctgtgtccaccagagaggtgatgtgactctcttctcttcgctgttcccttctcaaatgggtgactatgacatatcacgggccaagtgcctagcttatgtgacttttcctttctttatttttttttcttttgagatggagtcttgctgtgtcacccacactggagtgcagtggcgtgatctttgcttactgcagcctctgcctcaaaggttcaggtgactctcctgcctcagcctcctgagtagctagaattacaggtgcctgccaccacacccagccaatttttgtatttttagtagagacagcgttttgccatgttggccaggctggtcttgaactcctgacctcaggtgatctgcccaccttgacctcccaaagtgttgggattacaggccaccgtgtccggccaactttttccttctttacacgttctgcccacaaagaaaagtgtaacatattgctgcactcaacacaaagattatgttactcttttttggttctgctctcaaaacgtattgtgatgtattccttgtcctacctctattgtgatgtgagtcccctgcctggtccctgtccacaaggggcaatgtgatatatctctgggcccatcaaccacttgatgtgactctgctctcttacccgagcattgcccaaaaaagagattggggcctatctgcgaatccagagcttaggtgatatgacccttctctcctgcctgggccatacctaaaacagagagagtgacgtattgcttagtccagcatacatgttgtgtgacacttcttcctgacctctgcccaaacaagtaacagtgactaactcaggttttgttacctaaatgatgtgattctctttttctggggacctgtccacagtgaaggttgtgacaaattgcttggtccagcacctatgtgatgtgactctactctcatgcctgggacctgtccactgggtgattgtaacatacagctgagctcagcttctagattatgtgactctctcctttttcctgagttctacccacagggggtactgtgagatatctctgggcccctcacctaagtgatgtggctctcttgcctgtaccctcccctcagcaggtatggtgacacattgctggacccagcaccaaggtgatgtaactctcctctactacttcggctgtgcccaaaaaaggattgtatagctgggctcaacaaatgagtgaagttactattgtctcatgcctcagctctgtatacactgtatattgtgacatatttctgggtccaacacctaggtgatgtgactctcccgcatgggtcctgcccacaaaactattataatatgtattttcattcatcacctaggtgatgtaacttttctttctgcctgggtcttgccaaaatagaaaattgtgatatatcattggatccagaacccaggtgatgtgcctctcgttttttttgcctgggccctgcataatttgggtattgtgacatatcattgggctcaacccctagcaggtggaaggcttcagtctggaccctgcccacagaagaccttgtgacatgtctctgcatccatcacatgactctcgtcttctgcctgcatcatacccacaggaaagattataacatatcactaggttaagaaaccaactaatgtgttttgactgcctgagtctttcatacagggggcattttgacatatctctggcaacacctactatctgatattactcctcttttttacctgggttttgcccatgtaaaagattgtgacatatctcttgacccagcgcttaggtaatgtgactctgctcttctgcctgggccatgtccacagaaatgagagtgacttatcactagggccagcacacaagtgatgtgattcttctgcctggtctctgcctaaagaggtcattgtgacatgtctctgggcctatcatcatggggattatgacatatcactttgcccagcatctatgtgctttgacagccttctctttaatggacctgcccactagggtgatttgtgtcatggagcagagcccaccttctaggttatgggactttattcttttttgtgaatacccaaaaatggaatatctctgacattctcaccaaggtgactctcttttcctgggccctcttcttaggggcatttgtgacatattgctatacccagaacctaggtaatgtgactcttttttactgcttgggctttgcccaagaagtgcttgagatgtattgctgggcctagcacctaagtaatggtgactctcctctccttccaaaatactgcagacattgtgatatattgctgagtccaacacctagaaggtgcaacttttctgcagaagcactgcccaaaggagaataatgacatatcttttcattcatcatctagatgatgtgactcttctcttctgtctgggccctgccaaaaaaaaaaaaaaaaaggttattgtaacatatcaatggattgagcacctaggtaatgtaactcttctcatttccctgggccctgcatatgttgaatatcatgacctaatgctggtcccaacttatactgtatgagagactcctgcctgggcgatgaccaccagaggccttgtgacatatctttgcacccatcacctaatagatgtgactctcttcctctgcgttcatgctgcttatagaaaagattgctacatatggtggaacccacgaaccaggtgatgtgtctttcatgcctgggtattacccaaaggtaacagtgtgacatatcattgagccctgaatcagggtgatgtgctgctgttgtctgtgccctgcttttagtgtggaattgtaacatatccctggctgagaacccaggtgatgtgtctcttttttctggtcccttctttcagaaaagtttgtcacatatctctggcccagaacttaggtgatgtgactcttctgtttgctccctacacacaggtaggattttgacatatatattggctcagtgcacaggtgcaataatgactctaatattttgaactggctaagaggacaaatactgtctgtcatagctaggtgtagaaaaatgggtaagatcctgggtttcctttctgtatggaggttataaaaggttaccactctctcgcatattgtataaagcccttgggtggtagagagagtgtcatcacaaggcccagcgtgcagatgagattgtgtttcttgtgtgctcatcctgacaaccattaggattgtcaccctcacacatggatgaagcccactggtgaggtacttaatctcacacatggatgcagtccacagttaaaattgtgacattcatttgtgaatttctgtccagagttgtgatggtgactcatttctaaacccagctctggcaggtgaggactctcctatctggacccagccaatcagaaagatgtcgactgtcatacctgggcttaaagctacagacactatcatgagtccataacagcacaaaggatttagaggaagttgtgactcccatgcataccatataaagcccttgggtgataacagaacatgtcttaacatggccctgaacaaaggtaagattgtgacactcttacacacacacagcaaagagtaaagatgatcatcctttcacagcccactgttgagcttctgaatctcatacctggagacagtcaaaagttggaaaattgactctcatgagtggatctggtccacaggttgactgctgtctctcagatcaaaatctagcacacctgtgagactgtgattctaataagggaacacagtacacagaaaaaattgaggctctcatgagtggattcagtccattgtagagattgtggctcatgtatatagaagcaacatacaggaagcattgactctcatacctagaatttggacctttgtggaatttttaatctcatccttggaccttcttgcacgtgtgacatgtgcctcttcccagcacccaagtgatttgactctccttatgtgggcccagcccacagaagggattatgacatatcactgaacccagtagctaggtgatgtgactctactctttccttgacaatgtccacaggggcattgtgacatactggtaggccttgccccccaggtgatgtgagtctcatgttctgccttggtgatgtctacaggaagcattgtgacatatcgctggactcaacaccaaggtgatgtcacttttttgccttagctctgccttcaaaaggcactattacaaattacttggactattaccaaggtgagttgagtttcttgcttggaccgtccccacagtaggcattgtgacatatcacctggaaaatgtgactcttcacctctgcctacaccctgaccacagaaagaattttgacatatcactggatccagaaaccagatgatgtgtttcttttgccaggacctgggtcatagaaaatattgtgacttatctgtgggtctcttacctaggtgatgtgactcactctcttgcctggggccttcactcagagggtattgtgacatattgctggaccaagcatttaggtgatgtgactttctcaacatcttggactctgaccaataaggaatttgtatgtgttgatgtgcgctgcatccaggtgatgtgactctcctctcctgcctgggccctgcacatattgtgtgttgtgacatgttgcatgttatcacacctaggtgatgctactttctcgcataagtcctgctcacagaggcattacgatatattttttatgtctatttcctacgtgatgtgtctctcctcttctgccggtcttgccaaaagtggggattgtgacatattactggacacagattctaggtaacatgacactcctcttttgtctgggccctggatatttagggtattgtgacgtatttttgcactaaacatctagaaaataaaaggctcctgcctgggccttgcccacaggaggcctgtgacatatctctacatctatcatttaggaaatgtgactctcctctttggcctgcaccctgtgcacaggggagatggtgacacatcactgagcctgctcagcaggtgatataactctcttttcctgcctggcccccacgtatattgtgtattgtgaaatgtggctgggtccaacacctaggtgacgtgactctcctgcatgggtcctgcccacaaggttattatggtgtgtcttttgttcatcactaggtatttcaaattttgtcttctgcctaggccatgccaaaaaaaaaaaaaaaaagtactgtgacacatcactggagccagcagtaggtaatgtgcctttgctgattgggtctagccacagaagactttgtgacatatcgttaggcccagcaaccaggtgaagacactctgctgccttagtcctgctttcaggaggggattataccatatccctggctgaaaacacaggtactgtgactctcttgctggtccctactctcaggaaaaattatgacataaccctagcccagcaacaacgtgatatgactctcctgcctggtcactgccctcagagacggttgcaaatatctctggcacagcacccagatggtgtgattctcctgctcactccctccttacccaattgtgggactgtcatatatatcttagttcagtttacaggtgtcacaatgactctcataacttgagccagccaatatgaaagatactatctctcttagctgggcttaggaaaatgggtcaaatctaggtctcatttttgtatgaaggtcatagagaattaaccactgtctcgcatttcatagaaagtccttgggtgatacagagagtgtcaacacagagtccaagacacaggtgaggttttgtttctcatcattttctcacttgaacaaagcccattattgaggtcctgaatcttataggtggacacagtctagagttgagattgtgactatcatacataaacatgtaagcacagttgggatgatgactcattttaaggtcagctcataggaaggtgaacattcttcattctggactcagctaattggagagatgttgactctcatacttgggcttaaggccacaggtacaatcatgattcataccagcacaaatgtctcagagcagattgagaatctcatgcatcaggtataaagccctagggtgatacataggtgagattgtgagactcaccaagtcgacagaaaagattgtcatcttcccacatgaacacagcccattgttaaggctctggatttcacaaccaaaagcagtcaaatgttggaaaattgactcttatatgtgaatctggtccacaggtaggcaggtgattctaagaccaatattcagcacacctgtgaagctgtaacttcacccagataaaacagcacacaggaaagattgtgcctctcatgcacagatccagtttattgttgagatgaactcatgtacttagacccaacatatatgaggtgttaactcacatacttagaaacaggacatggctggattgtaaatatcattctatgactttcctacaggtgtaaatgtgatatatgcctctggccagcacctgagtgatttgacctacagtctgggaccagcccacatacaggattgtgacttatttttggacccagcacctaggtgatgtgactctattatcctgccttggtgctgcccacagggcacattgttggaactcacttctcctgcctggttcctgctcacaggggggattgtgacctgtgactaacccagcacctagctgatgtgactcctcttctttttatgttcttccctcaggggagactgtgatgtatcagtgggcccggaagccaggtgatgtgtctctccttcatgttccttgctaacagagaacattgtaatttactgctgggcttggcatccaggtgaggtgactttgctgcccgtgtcctgctttcaggaggggattgtaacatttatctctggcccaggtgagattgtgacactcttatgcacacaaaactcatagtaaagattttcattcttgcccatgaattcagtttactgcttaggttctgaatctcacattaggaggaagttaaaagttggataattgactctcatacatggatgtaattcacaggtgggttggtgaatctcagactatgattccatgaataagacacagtccacagaagggattgaagttctcatgcacaaattcagtccactgttaatattgtgaattttgtacttagacccaacatacaagaggtgtttgctctcatagccagaacagggacacgtgtaggatctttaatcttatccttgaacctacctgcagctctgattatcacatacacttctgccaagtacctgagtgagaatgtcacaatacaggcaaataccctaggtgtaggtccatgaatgtcacatggaattgtgacatatattcctgcccctagcacctagggtgtatgttttttattcttttgtcttggcattgcccacattgcatcttgtgacatattcctaggtctaaaacccaggtgatgtgagtctcctgcctagattctgcgaacagggggaattgtgacatatttctggacccattatctatttgatgttattctcctctcttacttggtatttgccaacaggtgacattgtgacacatctctgggcccacctaggtaatgtgactcttcttttcttcctgggctctgatcacagaagggagggtaacttgtccctggatgcagcccacaggagatgtgattgttcttgctggttcctgtccataaagacaagagatacacacattgtgatgtatctctgcgaccataaactagattatgtgactctcctttatttccagagacctgtccacagtgcgagttgtgacatatcacttggcacagcatctgtgttatgtgactctcctctcatgcctgggccctgctcactgaggttgtaactgcagctggccccagcccctaggttatttttctcttttcttcatcctgaggcttacccacagaaggcatgtttacatatttttggaaccctccccagatgacgtaactcttcttcctgggctcttttttcagggtgtattgtgccatatttttgggtccagcagcaaggattacctctactgcttgggctttgccctaaaagagattgcaatttattgctgggcacagcacctaggtgatgtgactgtcctctcctttctgggctctgcatatattctgtattgcaaaatatgcagcacctatgtggtgtgactcttctctcatgtttgaactcttttcactggagtgattgtgacatatacgtcagcccacctattaggttatgcaacttccctcttcattctgatctttacccacacagaaaattgtgacatatttctaggcctctcacctagatgatgttatcgttttacatgggccctcctctcaggggtcaggtattgctggacctaaagcaggtggtgtaactctctttgactgcttagcctttgttcaaggaaaaattgtaatgtttcaatggattcaagacctaaatggtgtgactatcatctcttgcctgaggtattgtgacatatggctgggtccaacacctaggtgatgtgactctcttgcatgggccctgccaacagaaggcattatgacatatctctgggcacaccaattatttgatgtgactctgctgttttacctggactctgcccatagaagagatagtgacgtatctctgggccaagcagctaggtgttgtgactcttctcttttgcttgtgtcaggcccacagaagggataatgaattaccactaggcccagcacacaagcaatgtcattcctctgcctggttattgtccacaagggccactgcaacatatctttgggcccatgacctgacctaggtgatgtgattctcgttttctttcttggacctgtccacagtggaaattgtgacatattgcctggtgcagcacctacataatattactctccacttttgtctgagccctgcccatgggtgtgattgtggcagataagtgagcactgactctatgttatatgaggcctctctttttttctagccctacctaccagagacattgctacatatttcttgtcccctcaccaaggtcatgtgacacttctgtctaggcctttctctcaggaagtattgtaggaaatttttgtacccagaacctaagtaatgtgactcttctctacttcttgggctctgctcaaggaggcattgtgtgtatccctggatgcagcacctaggggatgttactctcctctcctgcctttgcccaacatacattgtgtattgtaataaatggctggactcaacaagtaggtgatgcgactcttctgcatgagccctgaagacaggggtattatatgatacaatttattcatcacctaggagatgtgacacatttttgttgcctgggacctgccaaataagaagattgtgacatatcacttgacccagcatctaggtgaggtgattttttttttttttttgcctggtccccacatgttttgggttttgtgacatattgctgggcccaatacctagaaaatggaaggctccgcctggggcctgtccacagtggatctggtgacatatctctgcattaatcacctaagagatgtggctgtcttcttctccctgaaccctgcttacagggaagattgtgacatattgctggcatcagcaaacagacgatgtgtctctcgtaattgggccttgcccacagaaagcattttgacatattgctgggcttattactgaggtgaggtgactctgcagcctgcaccctgcaggggttgtaacgtattcctggctgagtacccaggtgatgtgactcttctgcctggtcccttgtgtcagggaagattgtgacatattcctggcccagaatacaggtgatgtgactctcctgtttgctccctacccacaggtaagactgtgacatatatcttggtccaactaacagttgcaataacgactctcatgccacacatcagccaatagaaaggatactgtcagttttagctgggattagagaaaagggtaagatcccatgtctcctctttgtatgaaggttatagaaaattaccactttctcatacatggtgtaaatccctagtgtggaacagaatgccatcacagagcccagcatccaaatgagattgggtttctcatattcttacactaccatccattgggattttcacccttacacgtggacagagcccacaggtgaggtcctgaatctcacaggtcgacacagaccacagctggaattgtttccgtcaacacagaccacagctggaattgtttccgtcatatgctacagttgggatggtgactcatttcttttcttttcttttttttttttgaggcggagtctcgctctgtcgcccaggctggagtgcagtggcgcgatcttggctcactgcaagctccgcctcccgggttcatgccattctcctgcctcagcctcccatgtagctgggactacaggcacccgccaccatgcctggctaactattttttgtatttttagtagagacggggtttcaccgtcttagctaggatggtctcgatctcctgacctcatgatctgcccgcctcggcctcccaaagtgctgagattacaggtgtgagccaccgcgcccggccaggtgactcatttctaaacctagttcataggtaggtgaggatgctcctatttggacctagccaattggagagaagttgacccagacaagagcttagggtaaaaattataaacatgggtccacaccagcagggagatctcagagcatattgagactctcatgcataaagccctctggtgctacaatgagtttcctgacaaggcacagcacaggtgagattttgactcttgtatgcacatccagttgacaataaagattgtcatactgccacgtgaacacggccaacttttgaggttctgaacgtcacatttggaggcagtcgaaacttgaaaaagtgactcttatatgtggatccagtccacaggtaggctggtgactctccgtccaagattcagcacacctgtgaggctgtgactctactaaggaggcatagtgcacagaagaaagcgaggttcccacgcacagacctagtccaccattaagattgtgactcatgtatttagacccaacatagaggagatgttgactcccatacttagaattgggtcatgtgcaagaattttaattttatccctatatctttctgcatgtgagattgtgtgacatacacctctgtccagcaactaagtgatttgacccttctgcctgagcccatcccacagatggaattttgacatcttgctaaacccagtaccttcatgatgggactctagtccactgccttggcaccgcccacagacagcactgtgacatatcactgtcactaggccttatattcagttaatatgagtctacccttctgttttgtcactgtgcacagaaggcattgtgacacccaagttatgtgattctcctgtctgtaccctgcccacatggcccattgtgatatattactgggtccaaaactcagatgatataactctcctgcctggtccctgcctacaggaggcattgtgacatctctgcatccattacctaggtgatgtgactcacttctgcctgatctctgctcacaggggatattgtgactcatcactgggcccagcattgagttgatgtgactcttctattctttttaggttctgcctgcaggaaaggttgtgatgtgtctctggacccaacggtaaggtgatgttacacttttgccttggttctgacctcagaaagctttctgacatattgctgggctcagcaccaagatgatgtgagtctcttgcctggaccctgcccacagggggcattgtgacatatctctaagttcatgaactatttgatgtgactcttcttgcttacttggtctttgccattagaagagattatcacgtctctgattccagtacctaggtgttgtgactctccttgtttgcctgcgctatgcccacagaaggtagagtgaattatccctaagcccaacacacaggtgatgtgattctactgcctggtcattgcccacaggggtcactgcaatgtatctctgggcccattacctagatggtgtaattctccttatttttctgcttctgtccccagtagggatggtgacatattccttcacccaacatttatgtgatgtgattctcctctcatgtctggactctgatcactgttgtaattttgacatagggctgggctcatctgtctaggttatgtgacaggttatgtgactctcttctttcttcctaagccctacctacagggagcatgggtacatagctctgggcccctcacctaaatgatgcaatcctcattcttgggcccttcactcagtgagtactgtgacatattgatggactcagcacctaggtgaggtaactctcttctacttcttgggctctgaccaaggaggtattgtgacgtatcgctgagcccagcacataggtaatgttactcttttctcctgcctgagctcagcataaattgtgtattgtgacatatggcctatcttaacaactatgtggtgcaactcttctgcatgagccctgcccataggggtattatgccatacctttttgtttatcacctgggtgatgtgacacatttatttttctgcctgggctctgctaaagagggttattataacatatcttttggcccagcacctatgtgatgtgactgtcctttctcccaggccccaaatatttggtgtattgtgaaataacactgggtccaacacctagaaaataagaggctcctgcctgggccctgcccagtgggccttgtgacatatatctgcatacactacctaggacatgtgactcttcttttctgcctgcaccctcctaacagaaaagattatgacacatcactggaccccgcgacaaggtggtgaggctcttttgactgagtcttgaatacgtagatcattgtgacatattgctgagccctcacagaagattgtgacatatatctggccccaaaccaaggtaatgttactctcctgcttactcccaatccatgagtgattgtgacatatatcttggcccagctcacaggtgatgatgactctcataccttgaactagccaatgagagagatactgtctcttatagcaaggctcagggaaaaaggtaagatcctgggtgtcctctttgtacaaaggtcacagaggtttaccactctcttgcatgttgtataaagcccacaagtggtacagagagtgtcatcacaggtccaaggacacaagaaatactgtatttctggtatgcacaccctgccaatccttaaaatagtcatcctcacacatggacacaacccactggtgagatcctgaatctcacacgtagacacagtctacagatggaattgtgtcagtcatatgtgaacatctggacacttatgggatagtgacccatttctaaacccagctcataggcacatgagtactcttctatttagacacagccaattggggaggtgttgactctcatacctgagcttagactgacacgtacaatcatgggctcatatcagcatgaaggtcttaatgcagattgcaattctcatgcatatcatattgtattagttcattttcacactgctataaagaactgcccaagaccaggtaatttaggtagaaaagggatttaattgactcacagttccacatagctggggagacctcaggaaatttataatcatggcagaaggagaatcaggaaccttcttcacaaggtggcaggagggagaaagtgaataaagaaggaacttccaacacttataaaaccatcagatctctgagaactcactcactatcacaaaaacagtatgggggaaactgtcccatgatccaatgacctgcctgctttgacacatggagattacaattgtagatgagatttgggtgaggacatagagccaaaccatgtatctcataaattctttgggtggtacagagagtgtactaacagagcccagctcaaaggtgagattgtaatactagtaagcagacacagtcaagagtaaagattgttgtcctctcacatgagcatggcccactgttgaggatttgaatcttatatctagaggcagtcaaaagttgcaatgttgactctcatacatggatttttgttatgcatggatttgttgaccttcaaaccataatttagcacacgtgtcaggctgcgacttatctaaggggacacaatgcccagaaaacattgagaagctgctgcacagatccagttcacagttgagattgtgactcatgtacttcacacaacatacaagacatgttgactctcatacctagaaccagaacatgtgagggattgataatctcatctgtggattttttgaaggtgtgattgtgacatacgcctcagccaaacacctgatttgactctcctgcctgggcttcgttcacaagtagaatggtgatatactgctggacccagaacctaggcgagatgactctattctcaagccttggtgcctcttacaggaggcattgtggcatatcgctgggacttgcactcaggtgacgtaagttttctctcctaccttggtgctgcacagaagggacattgtgacacatcactcattctaacacttaggcgatgtgactcttctgcctgggcccagcctaaaaaggggattgtgatatctccctgcactcctcacccaggtaatgtactctcatctcttgcttggagggatggtgacatatccctgggctcagcacctagctcatgtgacacttctcttcttcctaggttctgcccacaggggagattgttacatatatcctgggcccagctccaagatgttactcatttgccttggccctgtcttcagaaggtattgtgacctattgctgggcccaggaccaaggtgatgtgactttcttgccttgactctgtcaaaaagggggcatctgtgggtccataaatatttgatgtatctttcttttcttaccagggtcttgcttatagaagagattgttacatatctctgttcccagcatctaagtgatgtaactctcctcacccgcctgggccacgtccatagatgaaatagtggcttatccctgggcccagaacacaggcaatctgatttatttctcctcatctctttctacagggggcattgagaagtatctcttagcccatcaactatttgatgtgtatctcttctcttacctgggctttgcccataggggatgttgtaacatatggcccagcatgtaggagatgacactctcctctgattgttacatattgctttgctcaccacctacttgatgtgactctcctctcatgcatcgtccctgccccttgggggtgattgtgacatatagctggctgtagcccctaggttacgtaactttcctcttcttcctgagccctacccacagaaggcattgtgccatatctctggggctctcaaacctaggtgatgtggcgctcctgctttggtcttcctctcagaaagtattgtgatgtattgctggacctagaacctaggtgatatggctctcctctactgtttggtctctgaccaaaaagggattgtgatgtatcactaggcccagcacctaactgttgtggctctctactttctcctaggcactgcatacattgcctatggtgacatatgtctggatccaaaaccaaaacaatgcaactgttttgcattggcaacgtccacaggtgtattaccacatatcttttcctttagctctgaaattgagctctgaaataatctggattttttatctgtgtgtctctcctgttgagtttgaactttaatccaaaagccatgaaaagagtcataattactgtcacaaagtgataacttttttctcctcctcctcctttttcctcctttccatctcctccattccttttcgtcttctcctcctcacttttctcctcctctcctcatctcttcttcctccccattcatgttctcctgctcctttttctttctcccctcttcttcctcacctcctcctccatttctcccccacctcctcctccacttctcccccacctcctcctccacttctcccccacctcctcctccacttctcccccacctcctcctccacttctcccctttcttcctcctcctctccttttcttcctctcatctttcttcccttcctcctcctctcctttttactcccctccaccacctctcctcttccatctctcctcctccttttcctctttttctcctcgtcctttctcctttttgtttcctcctcctttcctcatcctcccgtttttttcttttcttcctcctcccctccccttgtctccttttcctctcctccttttcagttcttcctccttttccttcgcctctcctcctctccacctttttctcttcctccttctcctatccacattctcctcttcctcttacttttcctttctctccttcttctcctctcctttctcctctcctcctgttccttttcttctttcttctctcctcctcccctccttctcttcctcatcttccttttctccatcttctcctcgtcctcctcctcctctccccctcctttcctcctcttcccttcctcttcctcctactctcttccccctccttttctttgttcctactttcctccttctccccattcttttccttttttctcctctacttctctgtcctcttctcctccgtcttcttcctatcatcctccttttcctttcttctcctctactcttctcctccttttcctttttctctcctcttcctttttccttttcctcttctcttcctcccatcctccttttccttcttttcctcctccttttctcttctcctttctcctcctccttctcttctcctctcctcctcctttcctcttctctcctcctcctctacttctccttctttatcctctcctccttcttttcttctacgccttctcctcattctcctctcctctttttctcattcttttcgtctcctccttctctttcttcttcctccttctcctctttttctactcctcctacttttcctttttcttttctcccatccttttcctcctcctattcttctcctcttcgtttcctattttttctcctcctctcctctttctccactcctttcttttctcctcctccttctcttctcctttcctcctcctctccttcacctcttcatctcctcctccttcttctgctcccgattctcctcctctcctttctcttcgtcttctcctcttccttgtcccctcctcctccttgtccatctcctctactcctccttctcctcctcctccttctcttcctttcctcctttcctctttttctcatcctctcctcctcctctcgtcctcttctcttttcctcattcttttcttcttctcctccttttttctccctacttcctcctagcttcccttttctcctctcctctcctggtcctgttgtccccctctcctttttttctccacttcctctcttcttactatcttcttctcattttctcttctagttcttctctttcctcctccttttcttctcttctcctcctcctctttcttcactcctccactcctactccttctcttactgtgccactggccatgccaaacagcacccagcacaagtagtggcaccctcttcagcgctgcgctagaaagaactgatgtgcatttatattagcttttggaggatagtactaatccggcctaactcaggcggccaagtatatatatatatatacgtatatacatatgtatgtatatacgtatgtatacatatatatatacacatatatatttatagatatattctatgagaaataatcttgctctgtcacctaggctgcagtgcagtggcacaagattatgactcactgtagcctcaagagatcctctcacctcaccctcccgagtagctgggactacaggcgtggcccatcacacctgactaaattcttttttagtgacggggtctcaacacgttgcctagtctggtctgaaacttctgggcgcaagctctctaatgtttttgcattcatagtctcccttattttaatttctcaagtttttgcaaaattgttacataactatccgcccttttcatagagcgctgtttcttgagccaggtcttctgtccatgcatgtcctcttgagagagtggatgtcagccagctaccctggctgagagggatggggataatacagggatgcaataaaggagacagtgataatttatatgatctgggaccccaggcctcacaccagaactgtctagtatacttttagcaaacaagtgccactgatctgagccttgttctgcccttccactttccactttattacacaagcaggagataggcaagggagaaggcaggatgatgaggagactaaattccagaaaagaaagggctgcgtgcagtaagcagacagttgcccccaaagtggtctgggctcccacttaccttagagacatgtgcaacacttgtgaatagttgttttacaattcttaaatcagtggacagactgtaagcatcccattggtgtcagttgccaggtgcccaatgcctgttctctgcagcaacctttgtggtcccatacctgggcgtgagttctgttcctgcagagtgccctgtgcattctggtgcttttgtgccctctcctctaacctataaactgacaactctaactctatattttcacttacaatttttctgaagcagtgatcttttgtcatcttgatcacactacaagtcgctcaccctgcaagtacttgtaaaaatgaaagtaatctccattccttctggaaggtgattgccatgtacacaacctactaggccaggaacattactgatggctgtcctgatgcatgtctctctcacccccatgtccaatcagtcaccaggctctccccaaaaccatgctccggtcactgactttggctgtttaatcacttctgacctaaggtcctcattgagtcataagtacctcttgagttaattttctgcctccagtttctctctactgctgtttatcttccaccctgctgccagagtcatcatcctcaaaaatgaaagctgctctcattgtttgcctgcctaataacatctcttccctccctgttgtctacaaaaagaaaaatccaaactccttcacttgttttacaaagaccctcatctgcttccaaaccaaattgctagtcttggctcttgtctctgtcttccacatcactgccacactgaataattctttactgcctctgttgttgcacgggttgttctttttgttttgtctccatccccttcccccagcaaagaatatttactctttactcttctgttgagacccatctcaaatactaccttttctagggaaaattaggccttctgttcctaataacttttacccccatctatcaagtctgtctgctgtaatttatctgttaacatgtttctcccacctcaagaatattttttccatcttctgtacctagcacaattgcatggttggtgctcactgactactacatgttgatttatttattttacttgtttgagaggtggagtcttgctctgttatccaggctggtgtgcagtgatacaatcttggctcactgcaggctctgcctcccggtttcaagcaattctcctgcctcagcctcccaagtagctccgattacaggcacccaccaccacgtccagctaatttttgtattttcagtagagacaggtttcaccacattggtcaggctggttttgaactcctgacctcaggtgagccgcctgccttggcctggcaaaatgctgggattacaggcataagacaccatgcctggacttgcatgctgatttccgatataaaaatgaaatttttgaagattttggagaataccatcatgtaaattggaagctaaggcctaactattactacacattcagcaaaggaagtgggtataaactaacaactttggcacatctgtcatgcagtagtttgctgcaaggtggaaaagattttggtgctttggtgggaaatactgttgaattacagaaattctaaaacaaaagctggctcagcttaaagagaaaagaaaatgcttgctaatgcctgcttgcactaaaagctgtcacactgtggcctttaataattctaaacatttttaatggattttggtttgaacttcaaattcaataggaaaaataaatgcacagataaaggacccagatcatttcagagctccaatgtgtgaacccgttttctctacttatttagagttttgtttcactagtggcatgagttaataggagtgttgctttgtacataaattctctttattccataattcttggttttaaaaattgaatgcaataccagaaacctacagggtataaatcttgcttgatgtgtgtgcaatgtacatacttgataataattgattatatatcatatttataaaaagaatcatgtgtactgttttaggagaacatactttaccctgatactttattgttaaaaacaacaaagcattgttctaactactaaaaatcaaaaatttaactttcttttaaaagaggtacatgtatcttcagaaataaaagggatacccagaagataaggtaggtgttctgaaacacgaggtgaaacatttgaatgggttttttttgtcaaacaataaatttttaacaaagaaaaagtttgcattatgggtgaagtatccttagtatctttatacaagatgaaatcctgattgattaaagatacgttactaactttaaatgtcttttaataagtgcttacatgctaactagtatttagactcatacctggcagatacatttagacataagattctaacttagtttcatttctgaggaggcttgtgtattttcctctgtgatacagaaaatagatttttttaagccattttatcttttactttagagttttaattgtttgttaagtggtttataatggtttaattaacaacccgaacaggttttctgtgatttggttggttaaatctatatgtatttggttaaaatattctacgtcaaagttttaaaccaagagtaacttaaaggagtcttaacttgtgtttctctgaatttgatttgtgtttaaattatgaaattaagttttcaaagaacgatttttgtgttcaaaagcttaaggtttcacaacttaattttcctaagtacaatttttttctatcggacttagcctccttttagaagacagttttttactaccaaatttaccattcccatttttttttttacttttacagatctgtatttagtccataaatatccaaatatctgcttgtgaaggttctgtctttaccaccaagcctaccggtatggcaaagacatacagttgctaatctcattaaagatagatcacaatgagagagactcatctagccatgaacaggtcacttctatcagtgttaactgctcaaagttaagtatgacaagaagctatgaagtaaagtttggcctttgtgtatgggagaggaatggaggatgccaggatgcaggtcaaggaaggcatcctgtggaagtaacatttgagctaatatctgaaggatgtgtgatagaaggaaaaagaatgcttcagagaacagctggtacaaaagccctgaggttgaaaaggtggatgtgtcagggaaatgggggaagtacagtgtctggaagaagaaaagacactgaatgaggtgaatgacaggaatgatgaagtagataggggctagagcagattgtaagaactctggaaagctttgaaaactgttgggccaaaaagtagtatgatgaaatttgcatgctaaggactatttttacccaagtagtaaatagaccaggtagaaggaaataatgattggccttctgtttggaagatcagttagaaggctagtttatgaaaactttgaaaagcagtgatggcctgcagcatcgtgacagtaaagatgggagctcaaatggatttgataaaggtttaagaggtaagagaggcttgctgattggatggtgtggggaagggatagataacttcctgatcttggattttatagctgggtggatggtggtgcctcattgagactggaatgctggattaagcaatgtatatgaacagggcatgttccctaccctttaaagagttatgtatatgttttccatgtttttagctatttctccacttgtaatgtgttttagttggttaaaaattatgtacctggcatggatgacgcattaaatgtacttatgtaactgataaaccaatgttacattcttgaaaataaattacattctatgaaaataaatggctttctcctattcttttccttctttcaattttttgatactaaaatgcaaagaaaagatttcttgtagatgacctgagcttttgaatgattttcagatgagatgtacacctaaatgttaagagtgttgaagtttgtatttgatttagtgatgctttatctgtttgacttggaagcataggattcatgagaagagacttcgggtaggaagcaagctaggactctcaggatggcttaagcccatcagagcagttctgatgctaattaggagcatcagaactcctttcaaggcctgatttttcaagtcatttcttaattgaaagcccatgaagaacataagtggtcttgtgatatgcttaatgtcttagagatgtatcaatattttgcttcagcagtaatctgtgaaaataaagtttatgtagtaaacggaagttgctgtttatctactggatgctaagatcttcactagctctgtcagtgccaaagaaaatgattcattttacccctttcacaaagagtgaaacttatttccacagagtatttgtctagccagcatttaaatacttctggtgatgacagactttctacctacccctaagcagtccttgagattgtactatattttttaatggcaaacaaagtactgtgtattttaatggcaaacaaaatagtgatgttgtctgctgagttggtacatgctagaagctggagtgcaggcaggctgtcctgtgctttatgcaactcagggagacagcatgcaatctgacccccagagagttccatcaaggcatgcctcaactactcagcgagtgaccatcttctaccttaagatttctgctcctgagaaaaaatatctgtctcacttggctgcacagccatcctcttccgtgtgaattaggccaccatcttctaagaccatctcacataaaagttttactgggactcgcggccaggcatggtggctcatgcctgtaatcccagcacttctggaggctgaggcggatcacctgatgtcaggagttcgagaccagctttgtcaacatggtgaaagctcgcctctactaaatatataaaaatcagccgggtgttggggcgggcgcctgtaatcccagctactcgggaggccgaggtgggagaatcactggaacctgggaggtggaggttgcagtgagccgagattgtgccactgcactccagccttggcagcagagccagacttcgtctcaaaagaaaaaaaaaaaaagaaagaaagtcttctaataccatctcacatgaaagtcttattgggatgctcattttgggtaatgcttgtctctgatgtcatccacatgactcaccagaatcggaggtgagccccactgtgctccaaagatggtcctctgttatggtattaatcctgacagatgtaacctgaacatccctttgggcccctggtagcactgattttcccattttggggagaatatgatttttcatctcttgcttgagcccatggataattctgcatcaccacaccataaatatcattaggatggacaccatgctttattccatttctatatgggataagagaaactgaatataaaggaataatactttaaaaagccctccctactcctcactttaaaaaattgaaatagcttggtgaagggatgctgggaagaatacttctaaagctaagcttaaatatggtttttgaaaagttaaatcttaaggtactctacaaataactcagagtttttgcctcactgtgacccaagcgtatgcatgcatttagaagtctaattacaagttagtcataaatatatcttaccagataattaccatgttgtgaatatccaaaattggaatcaatagtatgttcagaaacaatttgtggtgacaagtatatataaggcaacttttagataagccactcatagctacttattttggagagtgctggataatggtgaccatacatgctgtctgttgggtgatgtaagttttcctaaatatttgtgtatttgcactgttatagtgctgcttcctcaaggccctggtgtgttacattttctatgctttggggtatgggcatgtcttacatatggctgtcttctgtatatgttagaccttctattgtggtaagactaagtgaatgaaagttgaatatattttctgtgaagtccctgaggaaattaattaagttaataaagaaatacaagtttgaaatttgagtttacttcagagaagtaatttgagtttacttcagagaaattaaaaattatatctggtaatacaggccatgcgatgtgtcttagggttgtctgtaatatgcctattctttgcatgcccaaagccagtgtcatgttgctaagaatgtgagatcaggatatatgctgtaaaattactctttcttcaggaaagcggatgctgtgcctcagaatgagagtgtgtgtgtatgtttggtcttcttgtgacagtaagtgctgaaaacagggtagtcactcatcttctccgtttctcatggatttggctttttttaagcagctctagatgtagatgtggtgaacatggtggtctgtgtgttctgaagcttgctgtgcgcctttgttactctgttctgcactggagagtggatagtgtgtggtcatgtgtttgttttgtgttatgctaagagaaagggagaagtatcagtgtattggagaagtggagtggttaacactggtcaaattcttatgtttagagattattatttatttcattattatctttacagtaaatggagttttgtaagggctcatttgcccagcttgtctctaagaagtctgatagtagctagggctgtctctggtgtctcttcagaaaattaaataaacagaaatccagtcctaaccagaaactatgacatgcttctattacaaacaaatctgtctagagtacttttaaataagtttaacctacaatattcaagttgcagacaaactttggtgaaaaccatttcttagccaggtttgtttgtatttgcattaaatcatataaaccagaagttaaatctttctgtttctcttctacctgtgctagacctattattaatcgataggaatccagtctgtaagtcaataatcaaaagttgaactttaattttcaccctttgttggttgttagcttttttacatagaaacacactcaccatgatggcagtaagagcagaagtcataagatctaacaattactgaccactagctaccagcatcctaattttttttttaacacatcatctttttcattcattacatgacagagggatgtagatgtaattattatcctcaggattcacgtgagaaaacagagacccagggaggcagccagctattagaactcaaactgttaagtttgtctccagggctgtgcttctgacccctgccggactacctaccatagagacacgattcgttcaccaaacaaatactaactgaaaatctcctgtgtgcagagttctccctgttaggcacatcaagcgaaaagatgggcaccccaaggaaaaagtataagtgtgccaggacagggtcctgatttccagaaataaatcacagcttacctagtcaacacctcattttacctaatatttgacgacataagtgggaccttcccttctgtgatgatcaggaatggagattggtattctgtggactgaggggcttgcataggtcgtgttactacatgaactgactgacttggatttgtgtgcccttaaagaggggaggttcaacaagacactaaagcagaatactagcaggctgagacccagtgggaaagaagagtgaaaccctgaacaaagcctgtcaaggatcaaatttttaccatgttctcattgcaaaggataatgtgtgaaaaagaggtggtctttcacatggtgggaaatattccagaagtgaaaaagggtgggcatggactctgcgattctgctggtcctctgtgtggtggatcatgggggactctcttatcttttgaaaccttttttgtggacacccacttttaacctcactggaagtgctgagccctattcaaggacccatatgaaacctccttttgaagagatttcaaactgtacactcataagtgtttgggaaatttagttttgctttgggtaggcccaacgccttgagaacaggtctattggtttgttataataggttattgttactttacatattatagaaactcaaggttttgcctcagaatttgcattggggtgatcctaaaaagttcataacgtgatatgagccaagtaaaggcaacaattgaattggcttgactactcatctaatctaaagatttgtccaagctcaactgtgatagcctctgggaggtattatttctttgttgttttgctttttaagcaggaggagccacatgtactggaggacagtgagaggaagaccttctgtgttttgagtatgtttgagatggggtcaccagtgtgcctagattcttttatgagggtgcctgaacaagttatgaaattgggaaatcttgcattgtgataagcacttgagggtctgtttcctgtttcttcctatctgtggataaggactattttgaaactaggaataaatagagaaatgaagtcatgcatgctaccagctcaattttaactgacttgtcttctctatttactgctagtattattattatcattgttatatttctcatgacattgggagagtttcagcaaagcaatagtggaaagcaatgtggattagcagaccagcattctggctcctttcttttgtcatctgttgaatatcactttcagcaagcttggattgggaaccattttttgatgcccacacctggtaccaggctgcggaactataaagattgatataatatggttctagttctaaaattcaccagtgactcacaaacagcaagaacaagtggagaactggcaagtgaaaagttgcagtgcaaagaaaaggtgataccctcaaatgtacatgttttccatgtgtagaggaagagtgtgggaaagaagaaatgtaaatttaggcaaaaaagtagtttaagtacaggacttgaagtattaaaatataaggcttatttgaggacagggtaggacaagaagtagagtgtgacaagagaatatagtttggaagtgttgtgtagagttggcatgatgagagatactggccttaggaaaatggatgaggggctcagctgtgtaggctgttatgagccatcaaatgttttggagcagggctgtaatgtgagcagctctgtgtttcagagggaacactgctaacgttttagaaagtttaagcttgaaaaaagacaatgtgttcagcaacgtgcagtgcaaacttgtaatttggtaccctttttgatagaatacattttccctttttaaaaagagacttttcagcccagaatgtattggctgccttcctatacatggttaaataataatagaaggtgagaaacatttattttccacaaatcaaattcaattagacaatgtttaaacttccctaattgtatttactaattggtacttatttaaactccttagagagtagacaattttagaagggacggacttcttttctctcaaaaacattgaatatgaacactaggagctgaatggagatatatgtaaaataattttgaacaaatgattattataatggggttaccaaaagcttatacaaatcagtaaaaagttaaataattcagtagcaaaataagcagaagaccttactaggtaattcaaaagtagtacactaaacatatataaaaccaagttacctaaatagttactaaaatgcatattaaaataatgagacgccagtttttcacataccaaaaaagaatttttttaactggaattttttaaactttttatttattattctttaagttctagggtacatgtgcatagcgtggaggtttgttatagtcaggaacctcaggcttcaggtctgttggagtttgctggaggtccactccagactctgtttgcctgggtaccagtagaggctgcagagcaacagatattgcagaacagcaaatgttgctgcctgatccttcctctggaagcttcgtctcagaggggcacccggctgtatgagatgtcagttggcccctacagggagttgtctcccagttaggctactcgggggtcagggagccacttgaagaggcagtctgtctattctcagatctcaaactctgtgctgggagaaccactactctcttcaaagctgtcagacagggatgtttaagtctgcagaagtttctgctaccttttcttcagctatgccctgcccccagaggcacagtctacagaggcaggcaggcctccttgagctgcagtgggctccaaccaattcaaacttcccggctgctttgtttacctagtcaagcctcagcgatggtggacgcccctcccccaacctcgctgccaccttgcagtttgatctcggactgctgtgctagcagtgagcaaggctccatgggcatgggaccctccgtgccaggcacaggatataatctcctggtgtgccgtttgctaagaccgttggaaaagtgtagcattagggtgggagtgtcccaattttccaagtaccatctgtcacggcttcccttgcctaggaaagggaattccccgaccccttgcgctttctgggtgaggtgatgccctaccctgcttcagctcacactccatgggctgcacccactgtctaacaagtcacagtgagatgaacccagtacctcagttggaaatgcagaaatcacctgtcttctgcgtcactcatgctgggagccgtagactggagctgttcctattcggccatcttggaaccccggaaaatactttttaaaataacatgttccattaaactcttcataaatgataattgtagggaaacaagagctttctaacactgttaccggaagtacaatttgatgtcatatttgtatatggcaggttttacactgtgcatcagcagcctttaaaatgtgctacatttcttaatatagtaattttaactaatatattaattttaacataatgaagtggaatcacttgtttggggtgaatgcctgaggttcatcatctcataccaaggaaatcgagtacatggacacagaaaaacttggtttaggagcagaggtttaataggcaaaagaaagagaaaggagaatagctctctctcctgagaaagagtgggacttttagcttgcagagaagtgcactggattttacagactgccttcaggaggcagtgtctgatttacataggggccaaagattggctggatcaggtatggatgtttacacagcttaggaggaagctagctaatcttcaattatgcaaatggagcacttgccagcaccatgttgcctgttcgttactctacacgtggtttacaaagaaaagggaagatggagccaccattttgaacatgtgtcctttccaggtagctccttttcctattagcagagctgcaggcatttattcatgcaagcttccagctcgcttatctatgtctgcagctcaatcttacaggctgctctttgttaaaaagaaataatttgggggtttttattaaaaggaaaactttaccaaggactgtttttgccctcactcactatctgcctaaattatttatttatttattcatttttgtttttgttgagatggattctcgctgtcgcccaggctggagtgcagtggcgtgatctccgcccactgcaggctccgccccccaggttcatgccgttctcctgcttttaactcctgtatcaataatagttaatgtcatgggaaacatttataacgtatttgtatgtatgaataagcaagatagcaagttttaactagtggttgtgtttaatttatttatacaaatgtgttgggtgcaagtataatttagttacatgcatagattgcatagtggtgaagtcagggcttttatggtatccatcactcgaataatgtacattataactattaagtaatttctcaccatctaccccaccctaccttcttactctttcatgtcaggtgtgctggccctcaatgaccaacacaacaaagataaatttattgttttctgagacttagacttagacttagaattcaaaatcaacctaagagaaaagatgaccccgagccaataaaacatttgttttatatatatatgtatttataaacacacacatacacagacatgtatatatatgtgtgtgtgtatgtgtgtgtgtatatatatatatttgtttatactgaagaaactcatacagagtctttcccactgcacaaacccaaaagtaaagccacatggccctatgcaataaacattatggtaataacttcaaaaaaaaaaaaaaacttcctccaatgaatgtaaattcgaaaataaaatgaaacaactatttctccagatgtgcagaaatcaatataaagacacataaagacacaggaaacacagaaaagcaaggcttatgacactttcaaaggaacacaataattctccagtactctaagaaaaaaaaattcattgaaatggctttaaaatactttaaaaagacttcaaaatatagattttaaagaaactcaaagagaggcaagagaaatctgaaaaccagtacaaaaataaataaataaatttagagtccaaatgggaaatgttccaaggagatagatatcttttaatagaaactgaaacaaaaattatggaactgaagatttattgcaggcaaaagaaaatacattcaaagattcaataatagactggaagaaacataaaaataattttcaaacctttaaacaggtcttttaaaataatacactcagacaaaaataaggagaaaagaataaaaaagaatgaagactttgtttccaactacatgaagtaactaaactttaaaattatcagtgtttctgaggaagaaaaaacatcaaaaagtttagaaaacctatttaagaaaacaattgatgaaaactttccaactctagcaatagaattagacatacatacacaggaagctcagcaaacaaaatacaacaaaatataaacaaaatatattgcaaaacagacatcataatggcacatgataatcagaatatctaaagtcaaagtgaaggaagtaattctaaaataagcaaaagaaaagcatctagtaatttataaagaaaaccacattagattaaaagcagacttctcagcagaaactttactgaccagaagagaatgggatggcacttttagagtgttgaaaaaaaagaaaactgccagccaaaaattttatatcaagctagaataaccttcacaaatgaagaatataaagtcttaccctgacaaataaatgctggggaaactaattaccactagactgggcctatgaaagatgttaaaaaaaattctaatataaaaacaagagattgatattcaccattattaaaatatataaaagtataaaactaacaggtcttacaaaacaaaacaaagtgaaataaatcaaatcacaacatgacagaattttattaaactacaaagacagataaaaaaataagacaagaaaataattaacattatgatagtaacaaaaccttacatattaatatttaccttgaatataaataaattaaatccttcattgaaatgtatagatttggttgggtgcggtggctcacgcctgtagtcccagcactttgggagggtgaggtgagggtatcacgaggtcaagagatcaagaccagcctggtgaatatgatgaaaccccgtctcttctgaaaatacaaaaattagctgagcgtggtggtgtgtgcctgtagtcccagctactcaggaggctgagacaggagaatcacttcaataggggaggcagaggttgcagtgagcagtgggacgagatcgcgccactgcactccagcctggcgatggagcaagactccgtctcaaaaaaaaaaaaaaagtatagatttatgaaatgaatgagaaaaaataacgcaaatctatgttgcctacaaaaatctcaccttacttgtaagacacatatagattaaaggcaaatgggggggaatatattaacacaaacagaaaccaaaagtaaataggagtatctatacttacatcaaataaaacagactttaaattaaaaagctgtaacaaaaaaggataaagatcatcatccaataataaagaaatcatttcagccaaaagatataacaattctaaatatatatgaacccaacatcacagcaccctgatttacaaagaaatattattaaatctatagaacgagatagacagtaatacaataatagtggagaaattcaacattctactcacagcattagagagaccattgagataggaaatctggcaaatcaacaaagtatccccccaaatcaaaattatacgaactacctacttagaccacagtagaataaaactacaaatcagtatcaagagaaatttcagaaactataaatttacaaagaatttaaataacatactcctcaacagtgactatgtaaatgaagtaattatgatggttgaccaggggtggtggctcccacctgtaatcccagcactttgggaggctgagacaggtggaccacctgaggtaagaagtttaacactagcctgggcaacatggcaaaaccctgtccctacaaaaaaaaatatgaaaaaatagctaggtgtggtggtgtgcacctatggtcctagctactcgggaggctaatataaaacgatcgtttgagcctggaaggcagaagttgcagtgagccaacactgtgccactacactccagcctgggtgacagtgtaaaacctatctcaaaaaaaaaaaaaaaaaattaagatgaaaattaaaaatttgtgggaaaaaagatggaaatagaaacacaatataataaaacctgtgagatacatcaaatgtagtactaaaagggaagttaatagcctaaaggcctgcatcaaaaaaatagaaagcttacatattaaggacctgacatcacatttcaaagaactagaaaattaataacaaatcaaatcccaagttagaagaggaaataaataaaaatcagaacacaaccaaatgacatgaagtccaaaaacaataaaaatgaccaacagaataaagagttggtttttcaaaaagacaaaattggtaaattgctagctagattaaccacaaatagaatagaaatctaaataaacaaatcagatataaaagaacagacattacaatggatacaacagtaatacagaagatcactagaaacgattataaacaactagacactcacaaacctgaaaacctagaaagaatgaataaatccatggaaacaaacaacctcccaagatagagtcgggaagaaatagagtacctgaacaaaccaatactgagtagcatgattgagtcagcaataaaaaaaaatgtcttgacaaagaaaagctcaggactaaatgcacagcaaaattctaccaagtgtacaaacaataataatcctcctgaaactcttaccaaaaattgaggataataaaactcttcctaagtcactcagaggtcagtatcaccctgataccaaaactagccaaggacacaacaaagaaaactattattaaattattatttattatattattattataaaaaatagacaaatggaaatcaaactaaaagttttggcacagaaaaaaaaatcagcagggtaaatatgcaagctacagaataaaagaaaatatttgcaaactacgtgccaacatggaactaatattcagtacttacaaataactcaaacaactcaaaaatataataatagtaataataaagaattctattgacaattgagcaaataacattactaatcatttttcaataaagacatacaaatagccaacacgcatatgaaaaaaatgctcaatctcaactaaaaataaaactgccatttttttttttttttttgagacggagtcttagttgtccaggctggagtgcagtggtacgatctcagctcactgcaaccactgactcccaggttcaagcaattcttctgtgtcagcctcctgaggagttggggctgcaggcaagtgccaccacgcctggctaacttttgtatttttagtagagacggggtttcaccatatcgctcaggctggtctcaaacttctgacctcatgacctgcccgcctctacctcccaaagtgttgggattacaggcgtgagctaccacgcctggccagaactatcatttgattcagaaatctcatcattgggtatctacccaaagaaaaatagtttattatatgaaaatgatacgtatacttgcacatttattgcagcatgctcacaacagcaaactgtatatatcagaaaagcttaatattcaaaatatatagaaaattcaaagcaaaagcaagtataataataacaataataatccaactaaaaaatggttgaaagagtgaaaaaaatattttgccaacaaatatatacaaatgaccaatagatatataaaaaagtgctcaatatcacctaccaaaaggcaactgcaaatgaaaacaatgatgagctatcactcgaaatctgttaggattgctaatattaaaaaaaaatagagaagtaacatctgtcattcatgttcctgtgatttctgaaacaaatcttaatatcaccactcctcttacacatttcagacatgatgggaaaagaaacgttaaatgatctaacatgcagttcctctaaaatactcagaaatattcttatactcccccaaaacaatggaagagcaggcatatcatgcagcaccttataagccataaagaggactttagctctcacggtaccctctaaggaaaatcactaaataggaagtaggatccttaaagaatttaagggtatgggacaaaagatgctcctatttgggagctagagaaataaatggctttttaggaaacctttccatggaagcagagcattctataccacattttaaggtctgaaattctttctgaccttcgtatccctcgtctctgttatctgcttcattcatgcttacctacctgagaagctgactactgtctcatgtctcttcacattccagggctcttttatttgctcaaagcaggatatcagatcagagttagagacagcaaggcctgttttgttagaaaaattagcatgactttctgggatcctccagttaccaacctagtactatgttcagtagagaggagagaatattatgaaagattctagaaatttaattccaaaatactgttttctgacagaaacttttgaatatttaaaacatacgtgacatttctgggtccttagctctactatccaatactgaatataaaattagtgctggatattggattttaatatttgtgcaacagtatttaatgccactgaatttctagaattatcattaatctagagtgaaggatacagattagctcaagagaggggaaggttcctattaagataaaacatcttgaagattttcttatctattccaataaaccttcaagtttttcttaaaagtactgatctaaaaataatttatgcagagcaaaacctcccaaaatcattctacaaagggagaaaatagaagcctgatggtatattagaaaatctggggtatatttattctcaccgagagaccaggtttctatagttctctaacattgcatctctacacaaatttcactgagcaggattcagacattcccactcctcttgagagaattctatggccaaagccttgaatgttaacatttcctaaacaaacccaaacacccacacatatttagcaaatggccatgggcagaattgttaattttactctaggtgtttgagagttacagagactggaattatccaataaaatattgttaaatagagaaagattctgtaatatatttttgcattctgaggaaagaaaatgaaaaaagatccacaaaaccactgtaggtactgtagttttctgaataatacagcataaaatttatggcataaacacaagcatatacagttttgagtgccatatttacattatacacagtaagttctgtccagttctcatatggagaagtcacagtaagttagaaggtacctctccaattttaacgtatatatcaatgagctgcagattttgttaaaatatggattccaattcaagagatctgagatgagacctgagttactgcattgctaacaaactcaccaatgacataaatgattctaacttaaggaaaatagtttgtaaaacatctagtgatagaacctgggttttgtccccatgtatatgaccagtgaacaaagatgacagccttcattttccaaagcaagatataaacaagagaaactattaagataagggatgtaagaaaaatggatgtgctgtggtcaataataagctgaggtaaacatctggttcagcatgactcagtgagtttgagtgcaggtgcacaattctgctcattatgtaacctagttctgtaagctcatacttggctttgagccactatcgtgtgtaaggagtacacagacaggtagacaggaggggaagagagagagtaaagccgctgaccctgcacacatggctcatgcccaggcttctgcccagagagataataaagccatatcaaaactgcccacaattcctcgagtgtttttccagcaacccaccactcgcccactgacttctatcagacctcagcttgggctggaacctgacacttagcatgacaggggagctttcagattaaatgtgattgtttctgcacattagtcagaaagtctctcgaaaatacctgttaataatacagtttttagaaagtaattttaaagtgaagaattccttcaggaaacatgctaaccaagtgaataaaatggacagattggcatcaggtgcggatgcatatatgaggatgcaacatgacttctgtgagattactggccaaaaatcataaattattattatttatttatttgttttgagatggagtctcgttctgtcacccaggctggagtgcagtggcgtgatcttggcttactgcaagctccacctctcgggttcacgccattgttctacctcagcctcccgagtagctgggactactggcgcccgtcaccatgcctggctaattttttatatttttattagagacgaggtttcaccgtgttagccaggatggtctcgatctcctgacctcatgatccgcccgcctcggcctcccaaattgctgggattacagaggtgagccaccgcgcccggcaaaaaacataaattataatctgaatctaatcatgaaaaacatgttttatgcaaagttcaagccacatatgatgcccatgttttgtaatttctagcagtctatttaaatactgtctctttagcattctagaagacacatttctttgaattaattcctttacatacacatctttctaaattattccaggctattaattccatcctttttcagtggggattttaaaattatgttcttcagagagctgatgaagcattcagatggaacctaaacggtgcacttttctccctcactgatatctgaggacccagcagcaaccccaataagaatgttttatatccctgaaagattctcccgaaaacttaagggaatgaataactcctccttccacaggcctagtccaaaggcacaaagccccttgcaccagcagcgtgcgtcagcaagagagcggaagcaggaacagttggcaggaagacacataccccctgaagatccagagggaggccatctgggtacagcagctggacaaaagaagctcctcagcctccagtcgcctgtctgtgcatgcccctcggtcactgatctcacctaccagtaagtatcctgggagcccagttaacagggaaaaatccacacagcctctcttgctctctccagtccaaaaatccaatgttggcccaagaaggctctggcatgtgccaggcacttgctgatcttttggtcttagggggatgcctctaagccatttgatcccgttctaggaacaaaaaaggcagtggtgacaatcgctccttttatcatctccctccagcttcccaggatggtccccttttccctgttctctctagcctaacctcggttatgggaaatctcaagttttccattccaaaggacatccttctaggctgcctcataaaaaaacctacaaacctcaggcctcagtcaagatatccgtgccttgtcttgttttacaattcaatctggccacaatacgaattggataatgggtccaaatggcccacaaacggaacattggactttacaattttaactgacttaatcaattattgctgatgactggaaaaatgaggagaaattacttatatccaggccttttttgcactcagatcacaacccaacctctgcaattcttgctcatgtgttcaaatcctcctcctctgttctcaccacccagattgccttcctcttcccgaccctacctctttttcctctttggatccagcagactgctgtccaccctcccagcccctacctctccctctcaaccatcttctttcacccccaagccttttctttatcttctcagccacaatcttctcagtcaccatcttctcagcagcaatattcccagccaccatcttcccagtcagcagtatccacttcttttcctatatcgtcccctcctcaggacaattctagtattgcctgtacccactgacctcccccaccgccctctcctgaggcttgtaaacccatcccgccactttacactcctatctatcctccactgcctgttaactcaacccccctcccctgttcaaaccctcagcaggaaccacttccaggttcctccttctctcccatccacacttgctcaggcgccacctttagcccatgccccactcttacttcagcggctgtgctacagtgcccccttcaggaagtggcagaaactgaacatgttgttagagttcacattcccttctccctcactgatatctctcaaattaacaaaaagactcagttcatttccagaagaccctacctcttatattagagtttcagtacctcacccagtgttatgaactaacttggcatgacctctacattatcctctctgccaccctctccccagaagacgaggaccgtatctagaccccagctcaggtgcatgccaatacaattcatcaccaggctcctgcccagcctactggtgcacaggcagttcccaaccaggaccccactgagattatcaagatgtggtccctggatgccaccatcgagacaacatgattgtgtgtctccttgcaggactcaaaaagggtgcccataaagcggtaaactatgaaaaactttcagaaatcacccaaggtcataacaaaaacccagccctttttctctcttgtttaactgacgccatgagaaagtataccaacgtagacccagctatcccagaaggaaccactaaacctttctccctctataccgatgaatggtgtggagttgcagtaggtgttctaacctagtataagggacccaccctccaggtttttgcctacctctctaaactgcttgaagccacagttctcagatggcctgtctgcctctgaacattgacggcagctgctgtccttgcccttgaaagcctaaactatctctccatgccaacttaacagtttattcaatccataacgtcaaagaaagacatgctagctcaccgcagtttcctctctcccccacggctcctccaactgtatgctctattcatagaagctccgcacatcaccatggtaaccagctcccatctaaacttggccacgccaaagatcctacatacttctgtatcaacactgttcaaacctttcttataccttttccaaacctaacagaccaaccccttccagatgcctctttacttggtttgtagatggcagctccttcctacatcaaggatgccggcatgctggctatgctatagtgtcaccccccctacacactgttcaagccaatatgctcttcctaggcaccacctcccaaaaagctgaactcatcaccctcattcgagctctcactctagcagccagtcaacagatcaacatatatttaaattctcattatgcgttccacatagtgcattcacactcgtccatctggaaagaatggagtttcctaactgcaaaaaaacactcctgtcataaatgactctatcagcaagctccttcaagctgccagactcctgcagaaagctaccgtcattcattgcagggaccatcaaaccccagacaatcctattttggtgggaaatctagcagatagagaagccaaacaagtagccctacaacctgtacaaggccagtttctgtgcctgtcctcgttctctcctctttactctccagaagaaaaggaggactaccaagcccaaaaccttcaaaaacaaggaccatggtatgtcaaggaagggtgcttccttcttcctcactctcaaacaatctctatcctccaaagcctccacaactctttccatgtcaattacaaacctctcctgcaacttctccaccctatcctcacttgtcttcacctttccagccgtgtttgagagattacccagtcctgctctatctgccactcagtatcaccccacagttccctttggccactgccttttcctacccactaagcccagggccaggtacccaggcaagattttcaagtagacttcactcacatgccacccaataatggctctgctatcttctagtctttgtccgtactttctctgggtgagcagaagcattcccaacaacttcagaaagtgcaaatgtcatcacacaaactctcaacatgcatataattcccaattttggactgccaacatccatccagtccaataatgggcctgccttcctcagacaaattacccaaggcatctctatatccttaggtataaaatgggttctccacacaccctacaggcctcaatcttcaggcaaagttgaaaaaaattacctctcttgttaaactcaccaagttggctctagtaaccctccagtggtggacaaaaaaatctccctttttccctcatgagattctgtgcaacaccaaaggcacactctttttatagtccctttgaaatcatgtatggctgaatgttgcgggaagtcagggaccctgaacggagggaccagctgaagccgtggcagaagaacattaattgtgaagatttcatggacatttattagttcccaaaattaatacttttataatttcttacacctgtctttactgcaatctctgaacataaattgtgaagatttcatggacatttatcacttccccaatcaatactcttataatttcctatgcctgtctttactttaatctcttaatcccatcatctttgtaagctgaggatgtatgttgcctcaggaccctgtgatgattgagttaactgtacaaattgtttgtaaaacatgtgtgtttgaacagtatgaaatctgattgtaaaacgtaggtgtttgagcaatatgaaatcagggcaccctgaaaaagaacagaataagcgattttcagggaacaaggaaagataaccataaggtctgactgccttatggttatctctattctgcagtctgactgcagaatacagccatatttttcttctcacagacagcctatggatggacgtgtgagtaggataaatatcactgaattcttttcccagcaaggaatattaataattaataaccctggggaaggaatgcattcccaggggtaggcctacagatgactgttctgggagtgtctgtcttatgcggttgagagaagggatgaaatacaccctggtctcctgcagtgtcttcaggcttgctaggattgggaaattccagcctagtgaattctagtcagaccagttctctgctcttgaaccctgtttcctgttaaaatgtttatcaagacaatgtgtgcctagcgggacatggacactcattggtaattctaattttgcccttgccttgtgatcctgctctacccttttgccttgtgatcttttattgccctttgaagcatgtgacctctgtgactcactcccaattcgtacgcccctccccttttgaaatccctaataaaaacttgttggttttgtggcttggggtcgccatcatggtcctaccaatatgtgatggcatccctggaggcccagctgtaaaatttctctctttatactctttccctttatttctcagaccagccgacacttagggaaaacagaaaataacctacattgaaatattgggggctggttcccccgatagccaaacttttgtcttggggcctctacccttcccagattctgagccattcaggaattacctcccctccttaatccagacatggtctttcattcgtgaagcggcaaatgaggccatgccccttcctgtcaacacctccttgtcctctcaacataactgtcttgcaggcacagatgtgtttatctgccaacccgagcctcacaaaaacctacaactgaagtggacaggcccctacactgtgatacgcagcatgccaactgcagtgagagtccaaggactcctcaactggattcatcgcactagggtcaagctcacccccaaggctactccttcctccaaaacattaacgtgggcaacactctcggagtacctgtatgtaataataatttaaaacaaacaaacaaacaaaaacaaccatgatccataaaggcaggaggaagccaaagatggcaacaggatgaatggcctccgcaacggatcatcgaatattaacagtcctgccacttggactgaggatagttcatggggttattgcactcccatatatactctaaatataataattagactacagggggttctagagataatcactaaccaaaccgcctcagccttggaaatgctcacgcaacaagaaaaccaaatgcgtgcagcaatttatcaaaacaggctagcactagactacttattagcagaaaaaggtggggtctgtggtcagtttaatatctccaattgttgtcttaacatagacgataacagaaaagcagtactagaaatcacttcaaacatcagaagagaagcccatgtgccagtccaaacctggaaggggtggggcccaacaaatctttaaggagggtggttctctaatttagggggatttaaaatgctggtaggaccagtaatcttcatcactgggttcctcctgtttctctcctgtgttatcccactaataataaaagccattaaaactcttattgaaactaaagttagctgccagacaatccagaccatgctcctgctacaatgacacgatggataccaacccgtctctcaagaataccccaaaaattaagtttttattttgcgaaggtgcccatgccacccctatgtcatgcctgaagtagttattgagaaagttgtcccttttttctataaccaaatagacaggaatgaaagattctccctggggtctgaacgcttaagggaatgaataacttctccctcctcaggcccagttccaaggtgcaaggccacttgtccaagtagcgtgcatcagcaagatagcagaagcaggaagagatatggccaggagacacattccacctgaagactgagagggaggctgtccggtaccatgtaacagttgcgtcagactgggacacttcctttttacagaggactataaaacccctgccctgtccttacttggggctgatgccatttcaggcctcagcccgcctgcaccgagatgctcattaaaacagtgtgttgctccacattgcctcatcttgtctgttggcacgctctcagggttcgaaccaatataagagccttgcaatccgcacctgcccaagctgatctgtcaacaaagaaaatactttcatgccgggcacggtggctcatgcctgtaatcccagccctttgggaggccgaggtggacggatcacctgaggtcaggagtttgagaccagcctggccaacatggtgaaacctcatctctacaaaaacacaaaaattagctgggcatgatggcgcatgcctgtaatcccagctacttggaggctgaggcaggagaattgcttgaaccctagaggaagaggttacagtgagccaagatcacaccactgcactccagctggggagacagagcaagactcaaccacagaaaaagaaaaaaaaaaaaaagaaagaaaagaaaagaaaaatgctttcaatacttcagggtataaattcaagtgagtattatttgtgatatgtaagaaggctggatggagagagttaaggctctgataaatcggggagaattattttaaagagatcctttcactgtcatgagaagaaaagggaaaaggtagttaaaataatcttgttaggcaaaagcatcagaagtagaaatgtaaatgattgcaattctaaatacatgacattgtagaagaaaatgtgaacagttttgacctgggacacacttatctaagaatcaaccattttttctctcttctctaattctttctcaggtgagattatctgaacaaatcaccaccttcatcttgagaatgtatcttcaaaggcattaggatagaccctctgaaggaaatagaccgctcctgcaggacccgggagacaccctaaatactgtgagtgccccaactgcagaaatgggaaagggagaccctcctctcctgaacacacacccccatacagggtggaggaggcagtagggaggccctgggagctcgctgaatcccgaagcagcccattcctgctggataccacaggaatccatcaggagggaggacagaggagcagggtgtaaaacactgaagggagaaggacttccctagctcaactttgcaagaatttgaatgaggcaagaagcctcctggccagaacccaggggaaggcgagaacctggcttgcagacttcacaggcagggaaaaactaaagccctgttctttcccagctgggaggcaggaagccttaagaaattttcaagcccaacttgccctccacctggaaacagactcggggctgttgtgggggcaaagtgaaagtgagacccgctctttggtttgcatgggagctgagtgaggcttatgactgccggctttcccccacttccctgacatcctgtatgactcagcagagacagccataatcttcctaggtacaaaactttagtgacctgggaatctcacccccatcccccatagcagccgcagcaagacctgcccaagaagagtctgaactcagacacatctagcacctcccgcacccaatgattcttccctacccaacctggtagtggtagacaaagaacatataatcttgggagtcacaccactgcactccagtcttggagacagagcaagactctgtctcaagaaaccacacaaaacaccaaactatgcaggcaacaaagagcatgatgaatgcaatggtaccacacatttcaatattaacattgaatgtaaatggcctaaatactccaattaaaggacacagaactgcagaatgaataagaactcaccaatcaactatctgctgtcttcaggagactcagctaatacataaggacccaaataaacttaaaggggtggaaaaaggcatttcatgcaaatggacacccaaagcaagcaggggtagctattcttataccagacaaaaccaactttaaagcaacagtgattaaaagagacaaaaagggacattatgtaatggtaaatggcctggtccaacagaaaaacatcacaatcctaaacatatatgcacctaacactggagctcccaaatttataaaacagttactaatagacctaagaaacaagatagacagcaacactgtaatagtggcaaacttcaatactccactgacagcactagacaggtcatcaagacagaaagacaacaaagaaacaatggatttaaactataccctggaacaaatggacttaacagatattagaaaacatttcatccaacaaccgcagaacacacattctactcaacagtgcatggaactttctccaagatagatcatatgataggccataaaataagcctcaataaatttaagaaaattgaaattatatcaagcactctctcagaccacagtggaataaaactggaaatcaactcccaaaggaacgttcaaaaccatgcaaattcatggaaattaaataatctgctcctgaatgagcactggggcaaaaacaaaatcaatatagaaataaaaaaattcttcaaactgagtgacaataatgacacaacctatcaaaacctctgggatacagctaaggtgatgaagaggaaacttcacagccctaaatgcctacatcaaaaggtctgaaagcaaaaacggaaaatctaaggtcacaactcaaggaactagagaaacaagaacaaaccaaaccgaaacccaacagaaaaaaaggaaataaccaagatcagagcagaactaaataaaattcaaacaaaaaaatacaaaagtaaatgaaacaaaaagtgcttatttgaaaagataaataaaactgatagaccattagcaagattaaccaagaagagagaaaatccaaataacctcactgagaaatgaaacaggagatataataactgacaccactgaaatacaaagaatcattcaagactactatgaacacctttacacacataaactagaaaacctagaagagatgaataaattcctggaaagatacaaccctcctagcttaaatcaggaggcattagataccctgaacagaccaaaaacaagcagtgagattaaaatggtaatttaaaaattaccaacaaaaaaagtccaggaccagatggattcacagcagaattctaccagatattcaaagaattactaccaattcttttgacactattccacaagacagagaaaggaggaaccctccctaattcattctatgaggtcagcatcaccctaataccaaaaccaggaaaagacacgaccaaagaagaaaactacagaccaatatccttgataaacattgatgctaatatccttaacaaaatactagctaacaatatccaaaaacatgtcgaaaagaatatccaacaacatgtcgaaaagataatccaccatgatcaagctgatttcataccaggtatgcagggatggtttaacacacacaagtcaagaaatgtgatacaccacataaatagaattgaaaacaaaaatcacatgatcatctgaatagatgcagaaaaaaaaattgacaatatttagcatccctttatgattaaacctctcagcaaagttggcatacaagggacacagcttaatgtaataaataaaagctatctatgacaagcccacagccaacataatactgaatagaaaaaagttgaaagcatttcctttgagaacgggaacaagacaaggatgcccactctcactactcctcttcaacatagccctggaagtcctagccagagcaatcagacaagagaaagaaatgaagggcatccaaatcagtaaacaggaagtcatactgtccgcttgctgatgatgtgatcatttaccttgaaaaccctcaggactcctccagaaagctcctagaactgataaaacaattcagcaaagtttcaggatacgagattaatgtacacaactcagtagctcttctaataaccaacagcaaccaaatggagaattaaatcaagaactcaacctcttttacaatagcgggaaaaaaattatatgaatatacctaacgaaggagtcgaaagacctgtacaaggaaaactacaaaacactgctgaaacaaatcatagacaacacaaagacatggaaacacatcccatgcacaagcatgggtagaataatttgtgaaaatgaccatactgccaaaagcaatctataaattcaacacaatccccatcaaaaaaccaccgtcattcttcacagagttagaaaaaacaattctaaaattcatatagaaccaaaaaagagcctgcacagccaaagcaagactaagcaaaaagaacaaatctggaggcaccatactacctgatttcaaactatactgtaaggccatggtcaccaaaacagcatggtgctggtataaaaataggcacatagaccaatggaacagagaacccagaaataaacccaaataattacagccaagcaatcttcaaaaaagcaaacaaaaacataaagtggggaagtataccctttcaacaaatggttctgggataattggctagccacatgtagaatgaaactggatcctcatctctcaccttataaaagaaaccaactcaagatggattaaggacttaaacctaagatcagaaactataaaaattctggaagataaaattggaaaaaaacccttctaggcattggctaggcaaaaatttcatgaccaaaaacccaaaagcaaatgcaataaaaacaaagataaatagctgggacctagttaaactaaagagtttttgcatggcaaaaggaacagtcagcagagtaaacagacaactcacacagtgggagaaaatcttcacaatctatacatctgacaatggattagtatccagaatctacaacaaactcaatctatacctccgacaaaagattaatatccagaatctacaacaaactcaagcaaatcagtaaggaaaaaaacaatcgcatcaaaaagtgggctaaggacatgaatagaaaattctcaaaagaagatatacaaatggccaacaaacatataaaaaatggttaccatcactaatgatcaaagaaatgcaaatcaaacccacaatgcgataccaccttattcctgcaagaatagccataatcaaaagatcaaacaactagatgttggcatggatgtggcaatcagggaacacatctatactgctggtgagaatgtaaactgatagagccaccatggaaaacatataaatgcatatggaaaacagtgtggagagtctgtaaagaactaaaagtagaactagcatttgatccagcaatcccactactgagtatctacccagagaaaaagaaatgattatttgaaaaacgtacttgcagatgcatgtttctagcagcacaattcacaattgtaaaatcgtggaaccaactgaaatgcccaggaattaacgcgtgggtaaagaatctgtgaaatatatatatgtgtgtgtatatatatataaatatataaacacttaaaatgtatatatacacacacatgcacacacacatacatatatatatgttggaatactactcagtaacaaaaaggaatgaattaacagcatttgcaatgtcctggatgagattggagactattattctaagaatggtaaaccaaatatcgtatgttctcactgatatgtgggaggtatgctatgaggatgcaaagacataagaataatacaatggactttgggtacttgcggggaagagtgaaaggggaagggataaaatacagcatatatggtgcagtgtatactgcttgggtgatggatgcaccaggatctcacaaatcaccactaaagaacttactcaactaaccaaataccacctgtacataagtaacttatggaacaataaaattttaaaaaagtatttttataattacagacaggctcacataatgaattcttcataaactattacacaggccagccgggcctggtacctcatgcctgtaatcccagcactttgggaggccgaggtgagtggatcacctgaggtcaagagttggagaccagtttgaccaacatggtgaaaccctgtctctactaaaaatacaaaaattagtccaggcgaggcggctcacgcctgtaatccagcactttgggaggcagagacgggtggatcacgaggtcaggaatttgagaccagcctgaccaaaacggtgaaaccccgtctctactaaaaatacaaaaatgagccgggcgtggtgatgcatgcctgtaatctcagctactcaggaggctgaggcaggagaactgcttgaacctgaaaggcggaggttgcagtgagcccagattgcaccattgcactccagcccgggagaaagattaagactctgtctcaaaaacaaacaaacaacaacaacaacaaacaattaagcaaacaaaaaacctattaaacaacaacaacaaaaaattatgggtctagcatgagtaccagtcaagttaaaacagaatttgcatggggagactctgaaccataagccaaaagattgtacagcaagaaattcaatacaaagcagagtataaatttgctttcagcatttttgagaatttttgttttgtagtaaattagacacctccttaaaatgattttgttccaatattgcttttttctgctaaaaatagtttcgaacttaaacacactccataatttatttacacctaagattcatcttagactaacagatgtgtatatttaactctatgtaaatcaatactaacagtccatatgtgcttgcaggcagaggccacatgttcgaagaaaaatatatgaaaaaattaaaaaagatttattcgggactcagaaatatatggattttacttatgtttgtatataagttttattatgaccataaaaataatcctgtagtcaacaacaatttaattgtacatttaaaaataactaaaactgtagaattgaattatttgtaatacaaagaataaatgctagaggtaatggagaccgcatttagtctaatgcgattgttatatattgtgtgtccgtatcaaaatatgccacatatggcataatatgtacacatattaggtatccacaaaaattaagtcaaatacatttaaatgagaaaataaaaataaaaatttagcctatgggaacaatattctttaacttaatggcaattaaaactcactggcaaaaaaaatcactagagatgtcagtccattatcttaccaaatagtgtatttttaccatcttttacctacacccttgagtaaggtggaataggttaaagttactggcataataacacttcattgaattcatgatagtatttaacatgttaaaactgtttggttgaaaagttcacatgcaatttataatttaaaaatatgctacatatatttcataaaaatacaataaatcatactaaactttaactaaaattaagaatgtttttctttcataataatgcagaatattaatctgaacatctacctcatgcatcactcgatattataagttaaccataaagatcctctctacttaaattttcatcatgcatcttacatttttaatgtccttacctttccatagaaaaggtcataaataatgcctcttcatatttgtaatgctttttcaaaatactcttctgtactttaaagacatattttctgatcagtcgtttgacagtaattacacttcttatttagtatgaacgctctgaatttgagtacgatgtgagcaggtattaatggctttttgtctatatttgttcactttttctcaagcataaatgctttcctatgcattaaggtgtgagcattagttcaaagcttggccacattgttcacactggtagttttctccagtatgaattatcttacctacgatcaagtgtgacaatcatttagaggctttgtcacattcttcacatttctaggatttctcagcagcatgattttcttgatgtttagaaaagtttgacttgtcaaaagcgttggcacatctttcaggtttgtagagtttctctccagtatgaataatattatgtctgttaagaattcaggactttttatagactttaccacattattcacacttgtaagatttctctccaatatgagttatcttatctgtagtaaggtgtgaaaactggttaaaggctttgccaaatttttcctgtttgtagggttgctgtccagtatgaattttcttatgtctggttagggctgaggaccagaaaaaggatttgccacattcttcacatttgtagagttttactccagtatgaattaccttatgtttagtaaaggttgaagaccggttaaaagatttgccacattctttatatttgtagggtttctctctagtatgaattttcttttttttttttttgagacggagtctcgctctgtcgcccaggcttgagtgcagtggcgtgatctcggctcactgcaagctccgcctcccgggttcacgccattctcctgcctcagcctctcgcatagctgggactacaggcgcccgccaccacgcccggctaattttttgtattttttagtagagaaggggtttcactgtgttagccaggatggtctccatctcctgacctcgtgatccgcccgcctcggcctcccaaagtagtgggattacaggtgtgatagtatgaattttcttatggttagtaaggattgaagactggttaaaggctttgccacatttttcacatttgtagggtttctctccagtgtgaattatcttatgtttagtaagagctgaggactctttaaaggctttgccacattctccacatttgtagggtttctctccggtgtgcaacctcttatgtctagttagggttgaagattggctaaatgctttgccacattcttcacatttgtagggtttctctctagtatgaattctcttatgtccatttagggttgaggatgatataaatgctttgccacattcttcacacttgtaaggtttctctccagtatgaattatcttatgtgtagtaagctttgaggatcgattaaaagctttgccacattcttcacatttgtatggtttctctccagtgtgcatcctcgtatgtctagttagggttgaggattggctaaatgctttgccacattcttcacatttgtagggtttctctccagtatgaattatcttatgttcagtaagagttgaagatttcctaaaagctttgccacattcttcacatttgtagggtttctctccagtatgaattatcttatgtgtagtaagggttgaggattggctaaaagctttgccacattcttcacatttgtagggtttctctccagtgtgcatcctcttatgtgtagtaaggtgtgaaggctggctaaatgctttgccacattcttcacatttgtaggttttctctctggtatgaattctcttatgttcagtaagggttgaggaccagataaatgctttgtcacattcttcactcttggaaggtttctctttagtatgaattatcttatgtgtcgtaagatttgaagattgattaaaagctttgccacattcctcacatttgtagagtttctctccagcatgtattattttatgtttagcaagggctgaggagtgcttaaaagctttgccacattctttacatttgtagggtttctctccagtatgaattgtcttatgcttagtaagggttgaggaacggctaaaagctttgccacattcttcacatttgtagggcttctctccagtgtgtatcctcttatgtctagttagggttgaagaccatataaatgctttgccacattctttacatttgaagggtttctctctagtatgaattcttttatgtttagtaaggcttgaggaccagttaaatgctttgccacattcttcacacttgtaaggtttctctccagtatgaataaacttatgtatagtaagatttgaagatcgattaaaagctttgccacattcttcacatttgtagagtttctctccagcatgtattattttatgtttagtaagggttgagagtcgcttaaaagttttgtcacattctttacatttgtagggtttctcttcagtatgagttatcttatgattagcaagggttgaggaattgctaaaagctttgccacattctttacatttgtagggtttctctccagtatgaattctcttatgtttagcaagggctgaagaatggctaaaagctttgccacattcttcacatttgtagggtttctctccagtgtgtatcctcttatgtcttcttagggttgaggaccatagaaatgctttgccacattcttcacacttgtaagacttctctccagtatgaattatcttatgtgtagaaagacttgaggaatgattaaaagctttgccacattcttcacatttgtagagtttctttccagcatgaattattttatgtgtagtaagggttgagaattgcttaaaagctttgccacattctttacatttgtagggtttctctctactatgaattatcttatgtttattaagggttaaggattgtctaaaagctttgccacattcttcaaatttgtagggtttctctccagtatgaattatcttatgtttagtaagggttgaggattgcctaaaagctttgccacattcttcacatttgtagggcttctctccagtgtgtatcctcttatgtctagttagggttgaagaccatataaatgctttgccacattctttacatttgaagggtttctctctagtatgaaatcttttatgtttagtaaggcttgaggaccagttaaatgctttgccacattcttcacacttgtaaggtttctctccagtatgaataaacttatgtatagtaagatttgaagatcgattaaaagctttgccacattcttcacatttgtagagtttctctccagcatgtattattttatgtttagtaagggttgagagtcgcttaaaagctttgtcacattctttacatttgtagggtttctcttcagtatgagttatcttatgattagcaagggttgaggaattgctaaaagctttgccacattctttacatttgtagggtttctctccagtatgaattctcttatgtttagcaagggttgaagaacggctaaaagctttgccacattcttcacatttgtagggtttctctccagtatgaattctcttatgtttagcaagggttgaagaatggctaaaagctttgccacattcttcacatttgtagggtttctctccagtgtgtatcctcttatgtctagttagggttgaggaccatagaaatgctttgccacattcttcacacttgtagattttctctttagcacagattattttatgtgtagtaagggttgagagctgcttaaaagctttgccacattcttcacatttgtagggtttatcttcagtatgaatttccttatgattagtaagggttgaggaccaatgaaaggttttttcacattctttacatttacaggacttctctgtaatataaacgcatttatgttgggttttgtgtaaacggatgcaaaatgacttgacacattttttacatttgaagcatttctttccagtatgtcttatcgtatgtctgtttgaatttaaaaatttatagaagactttcaaatatttcccacattgaaatactttgctctgggcagttgtgagacactggttaagtttattataaccttctttgtgcaccttacactcatccacacttttacaaccttttcttaactgtaaattctcatgtccacatttttcatattttctcagtaatactttttgaaaagaatcttccatgctctgctctggccaaaagtcttgaggaaaatgaggacatatacctgaaaaaaaaaaactaaaaataataaattactccactcacctagactcacatgaatatagtttaaaaatcttacctacaaaattatacaaactacataaacaatatggcactgcaaaataccacaggccctaattctatttttgtttttttgtttgtttgtttttgagacggagtctcgctctgtcacccaggctggagtgcagtggtgcaatcttggctcacagcaagccctgcctcctgggttcacgccattaccctgcacaggccctaattctttcatagacatatatatgtaacaaaaacatacagatcaaattacatctatggaaaatttatgaatgagttaagtgtgtgcagtgtctcaggggagcacaatgcaaaaaaccacacagaaaaaaaagaaaagtctgttaaatttacttgacacagcttttcctgcttcccattataacagagtgcctttagaagtaaattgccaactcctggtttatgttttaaaagaaaggtaaaatagtagcccattcatttttatttacagcttttaggggcttttcctgacactgatttccctctctcatgacataagtgttgaaagaaaccgtggcataatttggaatgaaagtttgagtctgctgagaccaaagaaaaatgttacagcagcagagagactgcagtaccacagaaaggaaacaggcatagcaagtgattactgactcctacaaagtaacataagtaaacactcttaattaagacataaacacaaaatttcagacaacacatatcctaagaacatatttgagaaattcccataatcattagacaagacagttgttttcaaactatgccaggacaaaactacattataaagactttgacagttagcttttttaaatgtccaaatctcaatcaaagattataatgtatacaaaatagggcaatatgatgccaccaaaatattataaaattttctgaaagaaaccataaaagagatgtatacattaattttatgaattggtaatgaataatactcactgattaaaataggaacagagacaactatggaaaatcggaaaaatgaggatgagaacaaaaatatttaagatttcaaaaaagcagaaattgtggaggtaaaaatataaaaactgatagatcctaaaagtaagaaaaaatgatgtaaaaataaagaagctcaacaaactaggatcacagaaagatatttataacaaacacatatataagcacaatttcaaaagtcacagacaaaaaaaaaatctttgaagctgcaaaataaaagtgatgtgccaggccaggccaggcatggtggctcacacctgtattttaggcactttgggaggccaaggaggacagatcacctaaggtcaggagttcaaggccagcctggccaacatggtgaaaccccgtctctactaaaactacaaaaatcagccaggtgtggtgacacatgcctgtaatcccagctacttgggaggctaaggcagattatgaggtcaggagtttgagatcagcctgaccaacatggagaaaacccctctctactaaaaatacaaaattagctgtgcgtggtggcacatgcctgtaatcccagctactcaaagactgaggcaggagaatcacttgaacccggaggcagtggttgtggtgagccgagatcgcgccattgcactccagcctgggcaacaagagcaaaattccatctcaagaaaaaaaaaatggtagttgtttaatatgtattaagatttagcttgcaaggtaaaaacattttagcaatatgttgcatgaaaatttcaagatgattaatatgactaaattaaatatttattttctggtaaattttgttttttttttgacaagtaaaaataataataactaaaagtacagagttatgatagttttaaattatattcacatttaaaagtgtttctcccataaaaaaatatagattcagaaataaataggatgttgaaattataagaattttatgactactcagctacacaggattagaaaatcactcacaacaaacccacacaacaaatatacaagttataaaaaatacaacgataatatttatacaggcaaacaaacatagagataattctattggaaaaagacatatggctcaatcatatttgatgttgctccagactgtcttaaattgcataaagttaaatattgacatgcacaattattatactaaaatatcaaagcacaattaacagatgtgtagtggcataccctaaaatatataacacaaaaatatacaattgcaaaaccaaattaaaacatggaatgtaaactttattaggcaccatcaactagattaacatattcattaaaaaatcttagaagaagaatatgggaaaaaataatacagagattacttgaaaataaaaaaaggtgagaaattcccaaattttgatgtaataaaagaaaaaaaattctaactaagaatacttgatttaaatttatttcactttaaaaagaagatgaaaataaaaaatttccaaaataaaaagtgagcgtgttcatcaccactagcacagttctacaaaaaaaaaaaaaaatgctacatggtgtccaggcaccgtgggctgatgcctgtaatcctacagttttaggaggcaagcctgtcagaacactagaaaccaggagtttcagatcagcctgagtaatgtgagactctgtaaataacaataagaaatgctgaaatgagtcagtaaaatgagtcagttttgttttaaaaaaatactggacagtatcataaaaccatatataaaataaagctctctattaaatgtaaatacacagacaaatatagaagtcttttttttttttttaattgatcattcttgggtgtttctcgcagagagggatttggcagggtcataggacaatagtgaagggaaggtcagcagataaacaagtgaacaaaggtctctggttttcctaggcagaggaccctgcggccttccgcagtgtttgtgtccctgggtacttgagattagggagtagtgatgactcttaacgagcatgctgcctgcaagcatctgtttaacaaagcacatcttgcaccgcccttaatccatttaaccctgagtggacacagcacatgtttcagagagcacagggttgggggtaaggtcatagatcaacagcatcccaaggcagaagaatttttcttagtacagaacaaagtgaaaagtctcccatgtctacttctttctacacagacacagcaaccatccgatttctcaatcttttccccacctttccccctcctctattccacaaaaccaccactgtcatcatggcccgttctcaatgagccgttgggtacacctcccagacggggtggtggccgggcagaggggctcctcgcttcccagtaggggcggccgggcagaggcgcccctcacctcccggatggggtggctggcccggcgggggctgacccccccacctccctcccagatggggcggctggccgggcggggggctgacccccatacctccctcccagacggggcggctggcctggcggggggctgaccagaagtctttactatcataatgatgatgcttaaaatccttaaagatcttctatagaatatttaaaacagaataaaaatggtaattgtagacaccaaaatcccattttcgataaatagaagattcatataaaaatgaataagaaaacagaaaacctagacaacattatacactgatttatcattctgcatatagaggaatacctgagaatggataatttattaaaaaaccaagtttatttggctcacaattcagcagactgtataaaaagtctgtgccagcatctgcttctggtgagagtgtcagcaagcttacaatcacggttgaaggcgaagattaactgtacacaccacaagataacagacagagcaagtacgaggtgaaggagccaggttcttctaacaaaccagctttcatttgaattaataaagtgcacacattttgattaccaagaggatggtgccaaactattcataaggactctgccccatgacccaaacacctcctaccaggtccgacatctaacatcaagaattacattgcagcataaggtttgagtaacatcaacatcaataccatattatagaccaactaggtttaacagacatgtacaaaacttttcagtcaaaagcaagggaatatgcaatatttttatttgcacctggtgtattctgttacgacacatactaagttttattaaatttaagaatgccaggtgggtggtgtagctcatgcctataatcccaacacatagagagaccaaggtgtgaggatcacttacagctaaaagtttcaggccagcctgggcaacatagtgagaccctatccctacaaaataatcaaataattattcagacatggtactttgtttgtagtcccaactacttgagagacttaggtggaaagataacttgagcccagtaggttgaggctgcagtgagtcaagattatgccaatacactccagcctgggtgacagagtaagatcctgtcttcaaacaaaaacaacaaacacaaaaaaacaacaaataaatttaagaatatcaatattatccactttgtgttttctgaccaaaactcaaactggagattaaaactgaaaaatccaaaaatacatgaaaataaaaaactcttcaacatatttttgcacaggaataaaaaaattaatttttcaaagatgtcaatacaaccaacagtggtacacaaattcaatagaatctttataaaaatcccaacagtagttttttaaagaaatactgtttgagatgttaaaattttgttacgaactatagccaaacacccatggaaaaaaaacaaaggcattataacttctgattttgaaacgtactaaaagcaacaataacaaaaacaatgaggtactcacacagataaacagatgaaagaacagagtagagaggccagaaatgaacccttctgtatatggccaaataatctcccacaaaattgacatgagcacacaatggaagataaccttttcaaaaaattctgttagaaactgaatatccattctgataaaataaagattatttccttaaaccatatgtgaaaatcttttaattagacataagaaggtaactttgttgttgttgctgttttgttattgttgttttttgagatggagtctcactgttacccaggctggagtgcagtggcgcagtctcggctcactgcaacctctgcctcccgggttcaagcgattaccctgcctcagccacccgagtagctgggattacaggcaccgggcacagcgtctggctaatttatgtatttttagtagagacagggtttcaccatgttggccaggctggtctcgaaatcttgacctcgtgatccacccacctcagcctcccaaagcgctgggcgacgaggcccagccgcataaatttttaatctcttaaacacatagaggggaggcagggcactgtggctcatgcctgtaatcccagcactttgggaggctgagataggtggatcacaaggtgaggagttcaagaccagaccagcctgaacaagatggtgaaaacctgtctctactaaaaatacaaaaattagccaggcggggcggcacgtgcctgtagtctcagctactcaggaggctgaggcagaagaattgcttgaacccaggaggtgggggttgcagtgagccaagatcacaccattacactccagcctgggtgacagagcgaaactccatctctctctctctctctctctctctctctctctctctctctctctctctctctatatatatatgaaacacatgacattagtcttggtgccaaattcttagatacaacattaaatgcatgagcaacaaagaaaaaaaccagaataatttaactacactacacttcaaaatttctgcatacttaagtaaacatttaatagagaaataatgcctcctataaaatggatgaaaatatttacaaattacatgtgataagtgtgaatatccaaaaaatataaacaacttttaaaacggaacaataaagttaaataactttatttagaaataaataattaaaataaattttcataaaaaaacacaaataaaaaaacatttgaaaggacacacaaaattactaatttgtagagaaatgcattaaaatcacaatgagaaacaaaatcccctcacacccacttaaatggtcactatccattttttaaaagcaccaaatctcttgataatgcaatcaaaatgaaacccttggctgggcacagtggttcacacctttaatcccagcactttgggaggccgtggcaggcagatcacaaggtcaggagttcaagaccagcctgctaaacgtggtgaaaccctgtctctactaaaaatacaaaaattacccaggtgtggtgacgtgtgcctgtaatcccagctagtcaggaggctgaggcaggagaatcgcttgaacccaggaggcagaggttggagtgtgataggatcgtgccattgcactccaccctgggcgacagagcaagaatttgtctcagaaaaaaaaaaacaacgcccgggagggaggtggggggcagcccccacccggccagccgccccgtccgggagggaggtggggtgcgcctccgcccggccgctgccccgtccgggaggtggagggcgcctctgcccggccgccccttctgggaagtgaggagcccctctgcccggccaccaccccgtctgggaggtgtaaccaacagctcattgagaaggggccatgatgacgatggcagttttgtcgaatagaaaagggggaaatgtggggaaaagatagagaaatcagattgttgctgtgtctgtgtagaaagaagtacacacaggagactccattttgttctgtactaagaaaaattcttctgccttgggatgctgttgatctatgaccttacccccaaccctgtgctctctgaaacatgtgctgtgtccactcagggttaaatggattaagggcggtgcaagatgtgctttgttaaacagatgcttgaaggcagcatgctcgttaagagtcatcaccactccctaatctcaagtacccagggacacaaacactgcggaaggccgcagggtcctctgcctaggaaaaccagagacctttgttcacttgtttatctgctgaccttccctccactattgtcctatgaccctgccaaatccccctctccgagaaacacccaagaatgatcaataaaaaaaaaaaaaaaaagcaaaaaacaaacaaacaaacaaacaaaacttatattgattgttggtggaaagcaggatgcacccattattttataatgttataaatgtactttaaataaaattattatcaaatacagcaattccatttatgaatctatatctaaaatatgcatcataagaccctgaagacatatttgatacaacggagtattattcaaccttaaaaaaaaacacaaaaaacttgtcacatttaaagatacactttgagattatgtcaactgaaataaactagtaacgaaacgataaatgttatgatttcactaagatatataaaatagtcacactcataaaaacagaaagtggaagggtgtttgtcaagggctagagagagcataaaatggtcaaatgttatttaatgggcatttcattttaattttgcaagatgtaaaatttctagaagtcttttgcataacaatgttaatattaacaggcctgaaatatacagttttgtttagttttttgagacagggtctcaatctgtcacacaagcttgagtagagtggcacattatggctcactgcagccttacactcccaggctcaaataatcctgcccctcaatctctcaagtagctgggaccacaggtacacaccatcatgcctggatatttcttacataaaaatgtttgtagagagggtgtctccatattttgcccaggctggtctcaaacttttgggctcaagcaatcctcctgtcctggcctctcaaaatcctggtcttacagaagtgagccaccaccatgcctggccctgacatgtacattgaaatagatttaagaaggtaaattatatgttatgtgtttttacaacaattattttaggaaaaaagacagaaaaaataaagaattataaattttcttgaaaattaccttcaaatcacaaaaactttttttcacacaaaggaaatacatattcatcattaaacacatggtgaaaataatgctatttcaaaggctactcacttacacaagacaaaaccaacattgaaagtgaactaagaggctgggcaaggtggctgacacctgtaatcccagcactttgggaggccacggcaggcagatcacctgaggtcaggagctcaagaccagcctaaccaacatgagagaaaccctgtctctactaaaagaaaaatacaaaattagccgggcatggtggtacatgcctgatatcccaggtacattagaggctgaggcaagagaatcgcttgaatctgggaggtggaggttgcagtgagccaagatcatgcattgcactccagcctcagcaacaagagcaaaactccatctcaaaaacaaaaaagaaaaaaaaatgagataagaaagaatatatacaagataagctataaccaaaactggggtcatatttgtagacataaaaacacacatatataatctgattgtgatagacatatggctcatttatcttttaattaaatcccacactgacttaaagtatacaaacagaattgcaaattgtctaaaattataatacataagtaaaaccaaaaaacaataaactcatattaaggaacttacactaaaaaacacactaatgtagaactgcaagaaaataatgaaagaaatgtttactcataaaatctagttggcaacattaatgtacgttaacaaataatttgtctagaaaacggcaatgtttgactaactgtgcagtcatggaaggcaggcactttaaattactggtatctattgtatggcaataaaatcccagagaaaatgtagtacaatcataaataggagatgctaatgagaaacttaatagataagcatttaaaagaaactagtgtcaatttttatgttttaaatatgtgctatttttacacaaaataaaattactgtaattcaagtttagaaccaactatagccttaaattgctaaattatgtatatatttagcaaaatatggttagagcttcatgtataaaacaaatatttgaggaatacattatgttattatttagttacaggctgacaaaagtggctgaaaattctgtaattcctatttgcctgcctgtatactaattacctaactcacacacaacatgtacattctagtatattgtcctaaatgtctgaatccaaaactacagacaaatttgaagtagaaaataaaaataaaaatttatatggagagtgacattaataagataaaaaaaaaaagatgccctatttgcttatctcctgacagcaagaaaatttggcagccattcctgacaaaaatgcgtttgtgagagaaccaggcatcatggttcacacctgtaatgacagctacatggcacattaaagttggagaactgcttccggtcaaaatattaagacctgcctgggttatgttgcaagaccccatctcaaaaataagtgcctttaagagagctctgagatccaggatgggagttatgaaactctgctgaagcccaagatcgaaggtaatcctttttagaaggcaagcctcattcaggcagcaaactacaggactactgtttttggctacagacaagaaaatattccacttaacttggttccactgagaattttgaactgtactctgtaaccatcccaaactcttcccagctacagacttggggaggttctgcccttccagaggcctggaggaagacacccatttatagccatgcagcaggcctgcagactttggcctttactgtggtccctgaagcaggtccatgattcagttccagctctctgagccacagttcatggccggttctgcctatgtagaaacccaaagtaacgtgggaaaatcctctcttgtactagatgaaagccatgctcatccacatcctcatataaagcccaccatatgcagacctgactgcagaaacctgcccttgggtctgccctgcagagcaaagtcctgaaggatattcactctgtccaaaaattaaatgagaattataactatccaagccccttttaacaacacaactaaaggtggacccttgtgcaaacccagcagacttaagaccaagctacaacccttcttcactacaaacccagatgacattctatcactctgaggacccaataaaaatagatttttactttctgaaaccagtctataaatacttgaacaagtgtttgctccttctttacagtcaccgatgcaaaactattgtttcttattgtcaatgcttctattttaacatagcactcaaagtatgtggaagacaaaacagtcaaaagaaaaatttaaagtcattgaaattgaagaccagtaagtaaaatgttgctttttgtagatcatgtaatcttatatatatatatatatatatatatatatatatatatataaataaacagtactttaaaacctgtttaaactaatgaatacactcagttaattagcaaaatgtaaaatgcaaaaaattagcaaaatgtaaaattagcaaaatgcactcttttctatgccatgaacagtactctggctgtcactgtaaacttgaagaaagatcattgaagggaaagtagaattcttagagattttataagcattaacagaagtgatagcataatttaaaaaaaaaattcaggcttcccagaaactatttcctttggaacacagcttctcagatcactttaaagacctgctttcttcttgactttgggcctctcatccttgtcgtctgttgtattcactctcacctacctgtgggttcatccaccatctcatgttgcttcatattccagggctcttttccttgctccagataagtaatcaggtctggcttagagagagcaatacctgttttattaaaaataactaacatgagtcttgctcatattctccacctgccaacttagtaatgtgctcagtaaagagcatataatagaatattctaataaattgtcccaatatactaatttgtaacagaaatgtttaaatatttagaagatattttaattttataggttcttaattttactgcttggtactactgtatcaaaaactggtgatggcaattagattttaaggtgtgagtaacagtattttatgccacaaaacttctgaaattaccactaatctaaagtgaaggacacagatcagctcaggaatgtggaaagttcaggtcaagatgaaacatcttgaggaaattcttttctaaacaaacaaatccccaggattttcttgaaaacagaaatctgaaagcataaatttccagaaaacattctacaaaacagaaatgaagcctgtaatcccagcactctgggaggccaaggcgggcagatcatgaggtcaggagatcgagaccatcctgtctaacacagtgaaaccccgtctctactaaaaataccaaaaaaaaaaaaaaaaaaaaaattagccgggcatggtggtgggcgcctgtagtcccagttactccggaggctgagtcaggagaatggtgtgaacctgggaggcagagcttgcaatgagccaagatctcgccactgcactccagtctgggcaacagagcaagactctgtctcaaaaaaaaaaaaaaaaaaaaagaaaagaagtaaaaccattagtttatattagaaacttagtattaaagttttccttacccaggaaggccaggtttctgtagttctctaacatcacattcctatataaattctgctgtgcagtgtccagacattgccactcctccggagagaattctatggccacatccctaaatgtcaacagtccctgaaaaacacacacaaacacacatatttacaaagtggctatgggcagaatttttcatttgactcaaggtaaaatcagaaagtgactagaactggttctgacttataagagtggctgaaattatccaataaaataattgtcaacacacaaacgttttgtaatgtattctctaactctgagaaaagagagtggcataatacccacaatatcagtgtatatatgatacttgtctagatgataaagtgtaaaattgagggcataaatattaacaagtacatttttgagtgttatatttacataatacagaatgacttgtgtatttttttcaggtgaaaaaggcatagttgttatatatttcagacacaatagacacgttgagttagaaggtaccactcaaaatttttttttttttttgagacagagtctcactctgttgcccaggctggagcacagtggcgcaatctcagctcactgcaagctccgcctcccgggttccgtgattctcctgcctcagcctcccgagtagcagggactacaggtgcccaccaccacgcccggctaattttttgtatttttagtagagacagggtttcactgtgttagccaggatggtctcgatctcctgacctcgtgatcctcccgcctcggcctcccaaagtgctgggattacaggcatgagccaccatgcctggccagtaccactcaaattttaatgtgtatgataaactagacatcttgttaatgcagattattttttcaggagatctgaaataaagtctgaattactgaatttctaaaaagttcactagtaatgccaatgttttgaccccaaaagactattctgtcaaacatccagtaagtggaacagcctgtgtttttttcagtttttctggcctgtaaacaaagatgagagctttcatttaccaaaaaaagatcaatgcaaagaaaacctaaaaaaaaaagggcagctgccagattaaatgtgatgttttatgcacatcacctgcataaagatacttaatgatgaagagaaaaataactctgtagtgaaaaaatctgtaagagagcttattaagcaagtgagttattaataccaattgcactaggacaagtttctatagtatgctgatgcaccatattgcccccactaaagtaaattacagtctcaatttaaccataagaaaatatcagttgcatggaaagttcaaggtacaggtatcttccgtgttctacaatttttaatagtgattttaagtactttctttaacaccctaataagcagctatatcctgataattttttccaaactttctgggtaataaatgccatcctgtttaaatgagcactttcttaatcctgtaatgcacagagataataaaaaaacagaacctcaacattatatgttctccatcttcactaagaatcccaggttttctccatagaaatagattatccacacctttccatgttcaacagccacaaagagaacatttttaatattgcagatcacaaattcatggtgagaattctgcatggcatataagaagccatcatgcagagaaggctctggtagatagaaaagaaatattttcagagatccttgactatcataagcttttttttttttctctttttttttgagacggagttttgctcttgttgttgcccagactggagtggaatggcacgatctcggctcaccacaagctctgcctcccgggttcaagcaattctcctgcctcagcctgccgagtagctgtgattacaggcatgcatcaccacacccagctaattttgtattttttgtagagacagggtttctccatgttggtcacactggtctcaaactgccaacctcaggtgatctgcccgcctcggcctcccaaagtgctgggattacagacgtgagccaccacgcctggcctatcataagcatttttaaaagtagttaagacaaactcattagggagaaaaaatacaggtacagaagtaaaaatttgcaagtactaaacgcgtggcattccacgaggcagagtggacacagctcttgatctgagacatgtttagctgaaaaaaagccattttttctctttctcctcctcctctcaaattctttctcagatgagtttttctggactaattatgtctgcattttgagaatttgcctttaataatttgagcacatgtttacctattaccaccacacccaaaggcagaaggcccaagacacaaaaactctacccatttctgtcctgaataacagaaaagattcagaacaatgagctgctccacagagataaaaatataagtttctcttttttttttgtcctcaggtgccctcccctgctacggacatcagcaatttctgctacagtaatacaaatattggccacactgtcctgtccttaccaaatccaaatagaacaggttcctggaccaccctttagtgcaaaggtggaacttaactctcatgaatgtatcttaaacttctcatacttgattctggcaccttagagtcacaggagacacttaattaaaacaaatagatgctatcttcagaacattaaacagaaactgtgaaaagggcacaagagagttctgtgaattggccatgtgcttctaattagaatcctgagcttataaccacttacctaagcattgccactcaagctttaattagcttataaatcacttggtaaacttggccccactctatgtaatgtgattctgcaggtttggaaatggtccataaatgggtgttctaaacaagtcccctgtcagtgctgatgtcactctctctggtctcattattagcatttgttagaaaaatgaggcacagcacagagtcccttacactcagcactcctgtcacaacacaaatacttctgatacaaatgaagacaaccattctctatcttaaagtatactacttgctggctctttaaagttcacaaagaaaacagaaaacagcaatttctgagtaagtctgcatttggaaaacaacatgtgcacatgtactaatgcaatgtttattaagcaggtactatgtaatcaacaggatgttacagagcactgtgataattcattatttgatttaattctaataacaccctgtgagttgatactaagtgttgaataatcccaaggatttagaataaggatccagcatttttatttcttcttctgtttttgtcactcatttttttaaaaaaatgcatagaataaaatctaaatatagacagatgagagggatacagatagagtgtaatgtaatttagatgaattattatgtttatatttactattttgtgacttgtgaatcaactactgtatctgcaggaacagaaaacaagttgctaaatggaatgtctctgtaaacactggttttaatataaaattattaaattaagaccctataatacatgttatttttccatttatctgctattgggtttcagaaaagtgtgagcaccaactctaaaaaggcaacaggattcattacccaaaactctgatctctactagttagttctgcgaggcaaaactccagggtagggcaagacttaaataaggccttcaaaaagggtgaatctaaacagggctgaagcagggtgtagagttgatgtaaaattctgttctttatgccactggggagtatttttagttccgtttctttttttaaacttagctaaaaaacaaaaacgaaaacagaaacttaaatctcagagtttgtgtaattttaatcttttttagccccactgccctttcaattttatatcacatactaataagcaatttaaacaaatcccttaaggttttctagaataattttttagatgataaataagtattcttagcagggcataaaaaatacaaataataacttttttgtttattaatatatgttcaggtgtagacatcacaagtcacaaaaatataaagaaaacggcccaaataaagcccatatttttgcacacatctatttattgtacccaaccttttgatgcataattaaaccacttatccagttgctagtctagactaaaagttcttgcatggtagggaccatgactgcttcatctatttttctaatgactatatgaattggaagcaattagtttatttgtttgagtctccagacctcctcatcatttttcactcaagtaccagggaactagagaaactctcacctgggtaccaaccaaagacatctcttgtatgaggggaggagcaaacacaggatgactcatttcttttacactaagttagaagcaaaattaaccactctagtcagcctgacacaattctgttctggagattctcaaatgtctcaaagatacctaggtgactgtgagagcatttccagtgaccctgggctgatggtccaataataagccagcaagagagactcaggctgattctaaatagaaaatgaaactaccaaataggcagagacacaattctgcctgcatatttaggtgacagcacacattttacagcgtaactgtgagttgactggaagcctgagagggaaagtcccctctagagtagagcttggttggcaccttatgtgtttatattatgtctggtaattctacacagtgtttgggaaatataatttttattaattctcttcagcaccagagaaaccacagtaatagaacagaaagaaaactgtctcattacacaattaagtctgaatgtcacatgcattacaatccatctgcttaagagattgaaaagaaataaagacggttaccgtaattagttcacaagtagaagaatttacagcgccatgtcataggtagttcatcctaaattcacctggtcattggggaggtcatccatgtatgctaattggttatattcaatgacaaaataagcttttcacatcttcatggcagaaggtagttttgcaacttgaagccaggtgcctgcttaaggtagactttcactcttctacaaaagtggttgaatagggtgctatctttttggctacttgcattttaaagcactggctctctactccctgaggacttgactagtgcactcctgcttcccctcttctggtggccagtgtcctcttttgtttcctaccatctgccactgtggtacagcccacagcacacggctcacagctggcagctcacatcttagatgaacgacaattgccacagcagcactttagtgtcacatcaaagagtgaagtctggccgggtgcggtggctcatgcctgtaatcccagcactttaggaggttgaggtgggcagatcatgaggtcaagagttcaagagcagcctggtcaacatagtgaagccccatctccactaaaaataaaaataaaaaatttgctgggcatggtggtgggcacctgtaatccaagcactcaggaggctgaggaaggagaatcccttgagcccagaaggcggaggttgcagtgagccgagattgcgagattgcaccattgcactctggcctgggcaatggggggaaaatccgtctcaaaaaaaaaaaaaaaaaaaaaaaaaaaaaaaaaaaagagtgaagcttgagctgcagaaggagagcttgcaggcctcccgggtagaatcgcaccttcacaataatgggaatgcgagcattatctaagccacagtttctatttataatggtgacatggaaaatatactgctgggtttccagcatgcatccagatagagatagctctaagagttctcactgtgacagcccatgtctttcacagacattatgggatactaatagggtttctaaaacagatacacaaagcattagaaagaaaaacagctctcattccgagaaagattatattgagagaaaaaaacaagttaaaagcgtcttaagaaaaaactgagattacatataagattgatcaagtcagccagaaaatattcctctaaaaataatttctctctaaatatccaaagtgcatagctactcacagcatgagaaacatgagtgttatgaagaaagggcacattatcagcagaattttagaagatttttttctatctctgctgctctctaatctgctgcccattaaatgtggaatctatatagaaatatatctgacaactaccaccagcactttttgattaaaaaaattaaaacctgtgttaatataatggaatatatgtgagcctgcaacataactaactaaacagctatacagttttggggtggccaaatcacctgcctttatttgtcctgtaatagcagcattccaatttctgaaatgaaagccactaaaattatacttacctataactatccctattggttaaattaataagtatatcagactaatctctactgtaacaatttggtaatacattttctttggatattagatataaatatgtaattatgaataattttaatatactactcataatgtatgtaggattttaaaaaattttctgcaactataattcagttgaaaaactacatttcaaaactatgaatcacaatattaaaacaactatttaaggaattcattcaaagtaaatattgtggctttatattcatactcttgcagaaaatactattgaatgtatatgaatgcaggttgtctacaaacattatacattactatgctaattgtactgaataaatagaaacaaaggtatgacaacacactccacttttcagtttataaactgaactctttttttctttctcttttttttttttttttgagactgagttttgctctcattgcccaggctggagtgcaacggcatgatctcggctcacctcaacctccacctcctggattcaagtgattctcctgcctcaatctcccgagtagctggattacaggcgtgcgccaccatgctcagctaattttgtatttttagtagagacaagattactccatgttggtcaggctggtctataactcccaacctcaggtgatccgcccgacttggcctcccaaagtgctgggattaccagcatgagccaccgcgcccagccataaactgaactcttttttcttttgtagtataaatactttagcctgcaaataatcatcatggataatcaggtttctgtcaaacaacttactcagtatcttttagtctttataattctttattgctaaatttaatcctatttttatgctcaacttttgtgtgcttttagaatgagcaagactgaacaaatctgtgtcaactttaaaagactaaaaattgtaagaacaatcttttgccaaagcaaaaacgaagcaattaatctcgggtcccagataaagacaatcctgagacaaaaaaaaaaaaaaaaaaaatgacaaaaggtttattcagctgttatttgatttatatatatttcaaaaaaagggagataaaatatatacgtaatctaaatgttataagaaaagagattttagtaagatattttcttacttttatgtagactaattaagcctcttatttctaatttatattttcttttacaacagccaggtctctaaacatgttcttgaactcctggacatctaaattttgcacactgtgtgcacatgaaagaatgtttatggaagaaaaaacagaagagagaaaggtgttacataaaattcataggttcagatgaataaagcatgttctcagagacctatgaagagatttagattcagacacaataatagtgggagactacaacatcccacaggcactaatagacagataattgaagaagaaaattaacaaaatatgagaacctaaactcaacacttgaccaaatattcctaataggtatctacagaactcttcatctaaaaataacataacatacattcttctcatcgccacgtggcacatactgaccacacaatcagaaataaaaaaatcctcaggaaattcaaaaatctcaaaattatacaaaccaaacacacagagatattaccactgaccccacaaaaacatcttgaagtctattatgaacacctctgtgcacacaaacaagaaaatctagaaaaaatgaaaaaaagtattaaggaatacatccttccaagaatgaacaaaaaagaaatcaaagccctaaacagatgaacaagaagctcaaaaactgaactgtaataaatagcctaccaaccaaataaagccaaggaccagacattcacaggtggaccagacgtacaaaaaagtgctggtattatttctactaaaactattttaagaaattaagaaaaagtaacttctctccaactcattatataagaacagcattattctgataccaaaacctggcagagataaaacaaaccaataaaattcaggccagtatctttgaacactgatacaaaaatcttcaacaaaatcatgacaaaatccagcagcatatccaaaagctaacccactatgagcaagtagaatttattttgggaatgcaaggttggttcaacatacacaaattaataaatgtgattcatcacataaaaagaactactaaagacagaaaccacaagattacctcagtagatgcagaaaaagcttttggtaaattttaacatctttcatgttaaaaatcctcaacaacctaggcattgaaggtacatgctttaaaataagttatctatgacaaaccctcagccccaatatactgaataaacaaaacctggaagcggatgggtacagtggttcagtcctgtaatttcagcaatttggcaggccaaggcaggtggatcgcctgaggtcaggagtttgagatcaacctggctgacatagcaaaaccccatctctactaaaaatgcaaaaattagccaggtgtggtggcgggtgcctgtaatcccagctactcaagaggccgaggaaggagaatcgcttgaacccagaaggcagaggctgcagttggccaagattgtgcccctgcactccagcatgagagacaaagggagactacctcaaaaagaaaaaaaaaaagcttgaaatattcctccttgaaaactggcaaaaggcaaaagatgccttctcttaacactactattcaacataaaattggaagtcctggtcagagcaatcaggcaaaagataaaaataaaaggcatttggctggatgcagtggctcacacctgtaatcccagcactctgggaggccaaggcgggtggatcacgaggtcaggagttcgagactagcctgaccaacatggtgaaaccctgtctctactaaaaatacaaaaattagccaagcgtggtgtcacgtgcctgtaatttcagctactcacgaggctgagacaggataatcgcttgaacctaggaggcagaggttgcagttagcgagatcgtgccactaccctccagcctgggcgacaaagcaaaactccatctaaaaaaaaattaaaattaaaattaaaggcgtttaaacaggaacagaggaggtcaaactatccctgtttgcagacaacaggtttccacatcaggaaaaccgtagagacttggcagaatagctctttaaacttacaaataacttcagtataatttcaggatacagccctccgcgcccaaccaatcccgggctgcaagggacctggggagctgcagcctggccagggcagtgcactcaggtggcctcgcttccctgcaggtcaccgcccaccacgccggaaccgcgcacagctagagccacttctgaagccacttgagaaaaatttgacagttcctaacgaaaaagattcttcagaaacatataccatctgtgaaaaaagttgccctttcttccgcttgcaaaacagacattctcaaattccaaaatgccagccaaggccccaatttacctgaaagcagccaataacaagaaaggaaagaaatttaaactgagacattctgtctcccgatatcatcagtccccctcttggaggcttttgccataccatccaaatcggcaaagagggccaagcatgacgtctttggagatatttcctttcttcaagggaacaatgagcttttacctggaaactaggagaaagcacacctgggtcagctccccgggcatagtaagttcttccgggccaacagcacctcagactctgtgttcacagaaacaccctcctcagtggtcaaaaataccatctccctcacgatcactggagggtcccaagctctcatgttgctcttattgtcaccggtgaactttaattccaaacaggagtcctttcggccagcaaagttgccaaggcttagctgcgagcccgtcatggaggaaaaaggtcaggagaaaagcagtctgttggagaacgggacagtccaccagggagacacctcatggggctccagcggttccgcatctcagtccagacagggcagggacagccactcctccaacctgtccgaacagtaccccgaatggccagccgaagacatgtttcaccatcccgcgtcatgcaagctcatcaagggaaagactaagtcagaggagtccctctctgatcttacaggttccctcctccccctgcagcttgatattgggccctcacttttggatgaggggctgaatgtcacggaaaaaaataagtaacaggatgcgaacttatttcctttggggtagaaggtacaaaaacaaactaaactaactgcagttgaacagaagggcttctgaagctgtatttgcagttttgtgatgggttttctaaaataatattcttataaagcatttttattttttacctgttatagcttgtttgcaaaaacaatttagaaaaaaaaaatcctgtcttggcaaaacgaggaaatctgtcagtcagaatccattttcagcaggcattggtgatgtttggctcagatattgtttgcagacacacaagaaatctagcttggccaggattggcactagctacaaagggctggacgtgtcacattagaaatttacagaactttacagcactccaacattttctgagcaagaggaagtaaaaacatatttaacacctcagccttttttctagactcttttctatatattgcttgggctcaccgtagagaattctccagtgttaaaacttttctgttttcacatttgaattttacgggttttggagattttcttgtagttcttatatatccctatatattatatctacattgcaaaattttaactgtcagctacatgttggtaagatacaggcaaagtactactgtaactaagttatttttaaagtaaaaatatatttttacatgcctttggaaaaaaataattttaggatacaaaataaatggacaaaaattagtagcatccctgtgaatcaacaacatccaagccaaatgtgatcataaacataatcccattcacaattgctgcaaaaataataaaatatctaagaatacagctaaccaggaaggtgaaagatctctataagaattacaaaacaatgcttaaagaagtcagaaatggcacaaatggaaaacaactttatgctcataaatagaaaaaatcaatatcctaaaagtgatcatactgtcctccaaaatttacagatttaatgctgttcgatatcaaatgaccaaaatatttttaacagaatgaaaaaaaaactgttgtaaaattcatataaaaccaaaaaagagtctgaatagccaaagtaaacataagcaaaacaacaaagctgaaggcattacattacctgttttcaaattatactgcaaagctacagtaaacaaagcaacatggaactggtacagaaacaaactcatagatgaatgtaacagaatagggagcccagaaataatgccacacacctacaaccatctgatcttcaccaaaagtaacaatagaaatgtggaaagaattccctatttaataaatggttgtggaataaccagctagcactatggagaagactaaaactggacccctttattacaccatacacaaaaatcaactcaagattaattaaagactgaaatgttaattttaaaatgataaaaaaccctggaagataaccaaagaaataccattctagacacagaaactggcagagatttcatgatgaaaataccaaaagcaattacaacaaaagtaaaaattgacaaattggacctaattaaactaaaaatctccttcaaagaaaaggaaactatcaacacagtaaacagacaacctacggaataatagaaaatatttgcaaactatgcttctgacaaacgtctaatatccagaatccataaggaacttaaacaagtttacaaggaaaaaatacctcattaaaaagtagacaagaaacatgaaaaagatgcttttcgaaagaagacaaacatttggctaacaagcatgcaataaaatgttcatcaataatcattagagaaatgccaagaaaaaccatgagataccatccacaccagtgagaacagctattaaaatgtcaaaaaatagatactgtcaaggtttcagagaaaagggaatacttatacattgctgttaacagtgtacattaattcaaccattgtaaaaagcggtgtggcaattcctcacagaactaaaaacagaattaccatttcaccaagcaacctcatcactgggtatatacccaaagaaatacaaattattctctcataaagacacatgcacaagggtgtttcactgcagcactattcacaatagcaaagacatggaatcaacttgaatgcctatcaatggtagactgaataaagaaaatatggtatgatcaggcacaatggctcatgcctgtaatcccagcactttgagaggccaaggcaggtggactgcctgagctcaggagtttgagaccagcctgagcaatatgggaaaatcccatctataaaaatgcatctctaaaaaaaatacaataagaaaaattagttaggcatggtggcacacacctgtggccccagctacttggaaggctgaggaacaagagtattgcttggcccaccacgatggctcatgcctgtaatcccagaactttgggaggccaaggtgggtggatcacctgaggtcaggagttcaagactagcctggccaacatggtaaaaccccatctcttctaaaaatacaaaaattagtcgggcatggtggtggtgggcatctgtactcccagctactcaggaggctgagacaggataattgcttaaacccgggaggcagaggttgcagtgagctgagatggcactattgcacttcattctagacaacaagagtgagactgtctcaaaaaaaaaaaaaaaaaaaaaaggccaggcacagtggctcatgcctgtaatcccagcactttgggaggcagaggtgggcagatcacttaaggtcaggagttccagaccagcctggtcaacatggtgaaaccccgtctctactaaaactacaaaaattagcagggcgtggtggcgcacacctgtaatcacagctactcaggaggctgaggcaggagaattgctggaacccgagaggcggaggttgcagtgagccaagattatgtcaccgtacttcagcctgggcaacagagtgagaccctgtctctaaaataaaataaaatatataataaaaaaatatgatacataaacatcatggaataccgtgtggtcataaaaaacaaacagaaaacaataaccaaaaacattgtttttgtataattcatataaaaccaaattgtaaaattcatataaaaccacaacagaggctgaatagccaaagtaaacataagcaaaacaacaaaactgaaggcattacattacctgttttcaaattatactacagagctacagtaaacaaagtaacatggaactggtacagaaaaaaacaagattatgccctttatagcaacatgaagctggagaccattattcttggaaaaccaatgcggaggccaaatgcagtggctcacgcctgtaatcccagcactttgggaggccaaggcaggcaaatcacctgaggtcaggagttggagaccagcctggccattatggtgaaacgccatctctactaaaaaatacaaaaattagccaggcatggtggtgggcacctgtaatcccaagctacttgggaggctggggatggagaattgcttgaacccaggaggtggaggttgcagtgaccaaagatcacgccattgcactccagcctggtgacaagagtgaaaccatcttttaaaaaaaaagaaagaaagaaaacaaatgcgtaaatggaaaaccaaatgcatgttatttataagtaagagctaaataataaaaacatgaacacagaggggaacaacagacactgacgcctagttgagggtggagggtggcaggagaaacagggtcagaaaaaatacctctttggtgctatacttagtaccttagttacaaaataatctatacacaaaaccaccatgacacaattttagctgtataacaaacctgcatgtgtacccctaaaccaaaaatagaagtttaaaaaaaaaaactccctgggtagggaagagtacactccaggtagaaagactggtttgtgctacagatagtggcccaggtggggctgtactctgatttatttctgggtccatgcaggcagatgagtttataaacaggtggtccagaaccccaggctggtggacaaaacagcctgctgctgcagattcagtgtctggaggtgggaatatgccagaagacttggagatacttctgtaagtttttggcaaaaaaaaaaaaaaaacactaggatcaaaaatgctgtagtaaaattcctgagtgtggttccctgtcctgggagaggtgtggacacattaatgtctagtgggtatgttagtgagtgggtgaaaatcttgtggtggtggctgtggcaaaaggggatctgccatcagagctcctttcctctaagttttaggtcctctgtcaccctggaaggggagctggaatcacagaacaagggacagtgtgacagcctgtgtagagtgcacagcctctcattcctggacacccagaggtttatactaatccaggagtctgtggtatctttcttctggcaccaaatctgtagagtttgctaaacaccaagcaattctccaacaccaacttattatctaaaacttcaattctgacaccacccagagtcagcacagaccttgattcagggctcagtctcacaacattgtcctcactgcagatgccagtcacaaactctataagcccatctatgcttctgagatactgtttagaaactggggactcccataatgttactgaaatttactaatttgttagagctactcacagaactcagcggaacactgtagtcatatttaccattttcacataaaagatacaacccgggacaggcgcgccagctcacttctgtaattccaccacttcgggaggctgagacaggcgaatcacctgagatcaggagttcaagaccagcctgaccaacatggagaaactctgtctctagtaaaaatgcaaaattagccaggcatggtagcacatgcctgtaatctcagctacttgggaggtggaggcaggagaattgcttgaacccgggagacggaggttgtggtgagccgagattgtgccattacactccagcctgggcaattagagtaaaactccgtctcagaaaagaaaaaggtacaaccccaacaaagtcatgtgaaaaaaatgtataagaccaagaataaaggtggaaaaagatgaagcacatagatgataaacagctgtgattaataaaattctctatcttttgtgttctccaagaacactttatggtgggggggcggaaaaacccttttcattatgatgcccaccaccaccacgcccgactaatttttgtatttttagtagagacggggtttcaccatgttggccaggctggtcttgaactcctgacctcaagggatccacccaccttggcctcccaaagttctgggattacaggcatgagccatcgtggtgggccaagcaatactcttgttcctcagctgtccaagtagctctgaccacaggcgtgtgccaccatgcctaatttttcttattgtatttttttttagagatgcatttttatagatgggattttcccatattgctcaggctggtctcaaactcctgagctcaggcaatccacctgccttggcctctcaaagtgctgggattacaggcatgagccattgtgcctgatcataccatattttctttattcagtctaccattgataggcattcaagttgattccatgtctttgctattgtgaatagtgctgcagtgaacacccttgtgcatgtgtctttatgagagaataatttgtatttctttgggtatatacccagtgatggggttgcttggtgaaatggtaattgtttttagttctgtgagaaattgccacactgctttttacaatggttgaattaatgtacactgttaacagcaatgtataagtattcccttttctctgaaaccttgacagtatctatttttttgctctcttttcttacctatcacacagccagaaaaacgctttgtgcattttctcctcttcctcattaaaaatcagctgactttgtcttcagtggtaaacataaaatacttcttaatctaactgaacttaagtttattttcttcccacaggctcctgaactttgagctaccctcagtctgagccaccatacaaccccattttatgtttatcctaagaacatgctgacttcagggtaaaacattctcaaaatctgattttattaccctctgtttaaacattcccctcctacctccttactaatcttgtttgcttttccctaggaaaaaaagccactgtctgcctcatctttgcaatctttaaaaatcttatagtcactacttcctcctgttgcaatactcctttgaaattcaagtttttacatacatctaacttttattttaaaaagtctagaaactgcctcaaaacaataacttcatcttcagtaagaccctcccaatacccttttatattaatcttaactgcatctgcgtgtgggttgccagctttccagggctctgtagattgtctcagtataggggcttcttccatagctgaggtgagcaagctgggacatctgcaggggaggctccccagaaggaactaagtgggtctttaaaaacctccttttgcaggctcaagcctgcaaaaggcttagcttggagtcactgggtttaagctttaatttctatgtcagagttattaacttggcttttgaaactataactaggtggtagaataattcagcaaaattatgcaaacacagtgttcatacaagggaagaaaagtttaaggtgtttacatcttatacctcagtaagaaaagcaaaagtatttattcctttcagacaataaatatattatgttattatttgtatcaaaaatcacgtagcaaacaattagtctgccgggcacagtggctcatgcctgtaattccagcacgttgggaggctgaggtgggtggatcacctgaggtcaggagttcgagaccagcctggccaacatggtgaaaccccgcctctactaaaaatacacaaattagccgggcgttgtggcaagcgcctgtaatcccagctatttgggaggctgaggcaggagaatcacctgaacccaaaaggcagaggttgcagtgagttgagattgcactactgcactccagcctgggtgacaagagtgaaactccatctcaaaaaaaaaaaaaaaaagaaaaaaaaatagtcacatgggaacacttctaggaggtatcaagtttcatcacataaaatttagcattaaactcaaaaatcaaaataccaggatatagaaccaggcacgacagctcacatctgtaatcccagcactttgggaagctaaggtggaaaaatcatgagggcaggaatttgagagcatcctgggccacatggtgaaaccccatctctactaaaaatacaaaaattagctgggagtggtggtgcacgtctgtaatcccagctactggggagctgagacaggagaattccttgaatgtttgaatccaggaggcagaggttgcagtgagctgagatcacaccattgcataccagcctgggcgacagagcaagatttcgactcataaataagacaaaaaaaaacccttaggtcaaaataagtgaacaaagcttttcaagatacagatatgtcttcctcatgtgtcaagtcaggccattcaattacttgagagattgtcccatcccatcctgctcacttaagtgctcaataaccccctctcaggagactctgaactatgccccagtgagtgcctcaggcacattatactctgcaagttcttacgccatctaactggggtcagttttttggttttttgggtttttttttgttttttgtcttttggagtgctgggtattttttttctagaaatttttttactatttttcttgcactatttttctgccccctaaaggaatccaggaggcagaaattatttgttttctcctcaatactagtatctgattggctggccagcaatgtgtctccaagaaatgaaagctgaattgggtgaaggcaatattaatgtctcaaggaattaactttaaaaaaaagtgcaccaggaaatgcctctcagcctcagggcatccacgtccacacttgagaagctaaactcaatacctcaggttgtcctatgagagaatatgacccagaagctgatattcactagacactctagcacacatagccatggtgggtatcttggtttatccccatacagtactgaaatctaggtccaagaaaaaactgaagggtgactgaagacacatcaccctatacagtttccaaaaggaaaacctgacccaaaaacattctggtaagatagctgcgtctagggaaaatagacgaaaaaaacgcacagagatattttaccatacagtgtcaggagattattctttgctttcttctcacagggagtatttaccaaaaaaaacaaatctttttaaatgtgccatcaaatgctttgtcaaaaaaaaaattaattggccagatgcggtggctcacgtctgtaatcccagctctttgggaggccgaagtgggcagaccagctgaggccaggagttcgagaccagcctggccaacatagtgaaaccctgtctgtactaaaaatacaaaaattagccagacgtggtcgtgggcacctgtaagtccagctacttgggagactgagagaggagaatcatttgagcccagtaggcggaggttgtagtgagcctagtgcgtcactgcactccagcctgggtgacagagcaaggctctgtctcaaaaattaaaaataaaaatgattaaaatcggtatcaaaatgtacactacaggacaaatagttgataaagtgaattagggaggggaaattggcatttgggaatgtcagacgaaactggaaatttagtattttactgcaagccagagttaggctggaggaacaggggatgaggggtggacttgaggccctgcttgagacacatgtaaaaaattcagggaaaaatcgtccccttttgagtgtgagaaaaattaagtggcaggcaattagattgaggtggctctagtcctcggatttctacttctaaaaataaaaatctaaactcaagagcattttttggtaaattactacattggcagaagcaaaatttaggcttaagcaactataaactgccaattaagctctgattacataagaaggatatttccacctagattgtaaaaattaagaaactaggccaggtgcggtggttcacgcctgtaattccagcactttcggaggccaaggtgggtggatcacctaaggtcaggagttccagaccagcctggccaacaaggtgaaaccccgtctctccgaaaaataaaaaaattggcctggtgtggtggcaggcgcctgtaatcccagctactagggctgaggcaggagaatcgcttgaacccggaaggcagaggttgcggtgagccgagatcacgccactgcactccagcccgcgcgagagagcaaaactccttttcaaaaaacaaaacaaaacaaaacctacataactgtacctagcaaattactgaatttggttttctttaccatgaaccttataaaaatatctccttcaaggcctttcatagaccacaaattacaaaccatagctgggtgctctacaatgtttgaatcactctttgattaaattatttaatcttttcgcggtgacgcccataaatttttaatagaaaaaaagaggccctgggaaccccacggactaaagtgcttcctattcatgagccagcacctccagtcaggattctcccctgacgaccctcccgtgatccctgcacaatctgggagagacgcggcgctgcgggagcagagctgcccagagagggctccaggccaggacacagtcactgggcagggaagagacaggacgcccggagcccgcctgtcaacgcagccgccatcttatcgctgaaggggactgaggccgagctgggcaaggagaacccgggcacggattgtggagctgactgaaggaaggcctgaggctcgccacagccgcatcccaccggtttcaacgagccccgttccctctctcgggacgtcgcacctggcagtctcaccatttctaggcttccaggggttcctggcatcttagctgtggctctccaatacctgcaggtcacagggccacacaggctgggcctcctggagcagaggacacagagcagtgaagtcgagacctggaaactccggcggcagcgagagacaaaggcccagccacatcccggaagccgccctgtccgctccagctttgtgcctgattggacagttcccagcccagcgtccctgattagataacgtttaaggccccgccttctcaggccctgagtgacagaagatgtgatcagacactgggctgaatgaagaaagagtgacagcgtaggctgcagccttttcaggcagggcttcctcagctcagccaggcccacctcagagcatgggaaaatcctctctcttctttgctctctttcaatgtattcaaaatgtgaacaaaaatatttgatgtatattaataatacataaaatttttgttccagagaaaatcaacttttactttattgtgtattatcaataataaagctaatttgataaaacattgtaagtctctcagccgggcgccgtggctcacacctgtaatcccaacactttgggaggccgaggcaggtggatctcctgaggtcaggagtccgagaccagtctggctaacatggtgaaaccccatctctactaaaaatacaaaattattgagcatggtggtgcgtgcctgtaatcccaactactcgggaggctgaggcaggagaattgctagaacccgggaggccaaggttgcagtaagcctagatcgcgccaatacattccagactgaacaataagagtgaaattccatttcaaaaaaatgaaaaataaaatataaaaattagctgagcatggtggcacacgtctgtaatcccagctactccggaggctgaggcaggagaatcgcctgaacccgggaggcggaggttgtagtgagttgagatcatgccactgcaccccagcaaaaaataaaaataaaaatacattaaaatttttttgacctctctagatttttatacatattttatgatctcttataattttttaattttttttttttgagactgagtcttgctctgtggcccaggctgaagtccagcggcacgatctcggctcactgcaacctctgcctttcaggtccaagggattctcctccctcagcctctggagtagctgggatgacaggtgcaccaccacacctgactaattttttgtatttttagtagagatgcggtttcaccatgttggccaggctggtctcgaactcctggcctcaggtgatccacctgccttagcctcccaaagtagtgggattacatgggtaagccatgatgccggtccattgtttaactttttatatttcattttaatctacattatttttactttttcaatttgaaggaacctttaagtaatttcaaagcagacaaatgtttctaactttcttcatcaaaagcatattttgcttttgtttatactctctctattttcttttaatttccaagagagaagcttgttctgtcacccaggctgaagtgcagtggcatgatttcagctcactgcaacctccacctcccagattcaagcgattctccagcctcagcttctggagtagctgggattacaggcgtgcgcgatcatgcccggtttatttccttatttgaagtagtgactggaatttgccatgttgctcaggctggtctcgatctcctaagctcaaaatgatctgcctatctcggcctcctaaagtgttgggattacaaggcgtgagccacaacacctggccttaaacattctctttgaagaattagtttttttacatctagtggtcttttattaattacattaacccttaacaaactaatttttagtgaaatccctaggaagtaattttgaactgttttatattaatatttgtagataaaaaacatttatatattttaatgttaaatacagtgagttctaaattgctcttcaaagaatcagtatgtcagtatattcagctccctgttcttcattctccattttaaagtttaacttctttgttgtttttgtctccagttttagtaaacaaccttcccgccagttctaatcagtagtttacatctgtacccctggtcacctgctccatcctgagtcacccctggtcacctgctctgacctgagtcaccttggtcacctgttccataacagtagttcccacccaaactgctcaccccaccactctggcttgtactcctcctctctttaaaatagccaatgggaattagcttagactgtgcagtccaaccctagccaataggggaatgacacagcagtaggggctacctgcatcagggctaagaactcctttccctcccttgttcaggtgtgctcttgccattgctccattcgcaagatgcacccttctataaaagtaaatattgtcttgctgagaaaatttacattcaagtactatttcctttgcggcatcaaaaatttgcttctaacatttaataaaagattttttttttaattttctgtaaacgaatctaaatatagttagcttttttataacatattaaagattctgggctgggtgcagtggctcacgcctgtaatcccagcactttgggagactgaggtgggtggatcatgaggtcaggaattcaagaccagcctggcaaatatggtgaaaccctgtctctgctaaaaaatacaaaaattagacaggcatggtggcgtgctcctgtagtctgagctactcaggaggctgaggcaggagaatcacttgaacccagtaagcagaggttgcagtgggccgagatcgcaccactgcactccagcctgctgacagagtgagactccgtctcaaaaaataaaaagtaaaataaaataaaaaaattatagtcaggcatgttggctcatgcttataatcccagcactttgggggagcaagtaatgaagactgtttaagcccaggaatttgagaccagcctgggcaacatggcaaaaacacatgtctaaaaaaaatttaaaaattaactgagcatggtagcctgcacatttagtaccagctattcaggaggctgagggaggaaaattgcatgagcccagaagtcgaggctgcagtgagccctcattgagccacttcactctattctgggtgacagagaccttttctaaacaaaacaaaacaaaacagccaaaacatagaaagttaaacttacggggttttgtgtttttttgtttttgtttgtaattattattacttccaaagtttttaaggtacaggtgatgtttggtcacatggataagttcttttgtaatcatttctaagatttaggtgcacccatctcccaagcagtgtgcactgtacccaatatgtagtcttttatccctcacccctctctcccgccctttctgctgagtacccagagtccattacataattcttatgccttcgcattctcatagcttagttcccacttataagtgagaacatacaatgcttggttttttattgctgagttacttagaataatggtctccaactaaatcgagattgctgcaaatgctattattttattcctcgttagggctgagtagtatgcattggtatatatatgccacattttctttttccactcattagctgatgggcattaggctgcttccatatttttgcaattgcaaattgtgctgctataaacatgtgtgtgcaagtgtcttacacatataatttctttttcttcatgtagatacacagtagtagaattgcttaatcaaatggtagctttacttttatttaatgaatctccatactgtttttcatagtggttgtactagtttacatacccaccagcagtgaaaaagtattcttttttcaccacagccacgccaacatgtattattttttgatgttttaatcatggccggttttgcaggaatatattggtttggttcagaaaggcgggacaactcaaagcgggcggcttccaggtaaatttaaatattttgtggttgacaagtggtggaatctgaagacctgggatcaatgaaagggaaggtttaggttaaggtaaaggattgtggagaccaagttttattgtacagaggaatctctcagataggtgaattaaaagagagagcagtttgtaaaatgtttattagacctaaacgggtgcctggctcttagttgattatctcctggatctgcaaagaaaaaaaggaaaacaaaaggggaaggggattctctacaaggcctaggcatgagaggagagtcacatcaagttaagtactgggccacgtgacatatcacaatccccatgtggacacattccagtaagacaacacctaggtgctgggcccaggaacatatgactgtgtcttttataggcaaacacagggtagaagaggggaggggataacaatcaaacatctgatgggccaagagatatgtcacaatgccccctgtgggcagggtccaggctggagacacatatcaccttggcgttgggcccatgaatatgtgacagtgccttctgagggcaggcccaaggcaaaagagtaacatcattatgcggctgggcccagtggtttgttacaatctctgctgcagttgaaacctagaaagaagagaagaatcaggccaggtgcagtggctcatgcctgtaattccagtactttgggaggccgaggcaggaggatcacctgaggttagaagttcgaaaccagcctagccaacatggcgaaaccctgtctctactataaatacaaaaattagccgggcgtggtggcacatgcctttaatcccagctacttgggaggccaagtcaggacaatcgcttcaacctaggaggcagaggctgtagtgagctgaaatcatgccgctgcactccagcctgggcaacagagtgagactccatctcaaaaaaaaaaaaaaaaaaaggaaagaaaagaaaagaagagttacaccagctaggtgtattgggcctagcaatatgtcacaagttgttttgtgagaaggaactaagcagtaaaagggaatcatattacctgggtgatgagcatagagatatgtgacaatgactcctgcaggcagaacccaaacaagagagtgacattacctgggttttagacccagcaatatgtcacagtgacccatgtgggcaaagcagaggcaggagagtaacataacctagtggggagggcagcaatatttcacaattttcattgtggacggcaccaaagcaggagagaaaactcccatcacttgggtgcaaggcccagtgatatgtcacgatgccccatataaaaacacagaggcaagaaaatagagtcacatcacctagtttctggtacagtgatatgtcacgattccatctatgggttaaatccaggcaggagagtaaactcactcaggttctacacagaggcatgtgtcacaatcacaagtgcaggaagatccaagatgagattaacaatcctgtacatattccgcttctgtgtgcagcagcaaggcagaagaggagactcacattacctgggtgtaaggctctgagatatgttacaatgtctttttcgagtagcaccaaggcagaagaatagagttacatcacttaggcactgggtccagcagtgtggcacaatcctatttgtgggccgggccaattctgaagaatcacattactcaggtgctgggcagaagtgtgcgtcaaaatcacacctgaaggaaagaccagagatgagattaacaatcctgtacgtaccctaattcttggtatgagagtcaacacctcctgtatgttgggtctaagtacatagtcacaatttttagaatgagctgaatcactgaatgagagactcaatccctcttactggctgtgtcaccttagtggaatcagacaaacaggtgtgttcaatcttggtctgaaagtcaccaacttacctttggactggattcacttatgagtaaattttacaacttgcaactgtctctgcatatgagattcagaatttccagtggaccgttcttgtgaaaagatgataatctttactgtcgactgggtatacaggaatgtcaaaacagctgtacactgagtctagctagaatactctctgtaccaaccgaggatttataaggtatgcatgagagtcacaatcttttgtgactaggaaacatttgtgctggtatgggcccatgatcatacctgtggctctatgctcagatgagagagtcaacatctctgtaatggctgggtccagatatgagagttgacacctgcctataagctaggctaatgagtcaccacctcatgttgcctgatgttcacatatgacagtcacaattttaactctgcactgcatccacatgtaaaatttaagacctcaccagtaggctctgtccatggatgagggtgacaatcttaacaattggcaaactgtgcaaatataaaacaatctcgttttctggaccctgttatgacactttctggagcactggagggctttatacaatatgggagagactgtaattttctttaaccttcctacaaaggggagagccagaatcttacccattttcctaagcccacatatgagagatagtatgtctcctattggctgatttcagatatgagagtcaacattgcaccaatgatctgaacaaagatatatgtcacaatctcccctgtggatagggagagagcaggagacttatatcatctgtgtaataggccaggtatatgtcacaatcttctctgagaacaggcacaaggcagaagagttaaaaactgggtgcttaggcatataaattttctcctgaaatcagggcacagagagtagagtcacattacctgggtgctgagaccagagatatgtcacaatgctttctatgagcaaagctcaggcaggagaaacacatcacttgatttctgtgccagaagatgtgtcacaatctctcatatgaggaaagccttggtagaaaaggagagtcacatcaaatagttgatgctcttaaagatatgtcacaatgctctgttgtcagggtccatacggaagactcatgccaccttgttgctgggcccagcaatatgtcacaatgccttttcaggtacaggccaaggcagaacagtaatgtcacattggcgtagagccccacaatatgtctcagtcttccttgctagcagaacctatgatggaagaagaatcacacttgtttggtactgagccacatgatatgtcgcaactccccctgtgagcagggaccaggcaggagaagaaagtcacatcatgtgggtgaggtgtgaaaatatatgtcacaatgctccttgtgggtagtagagttgcattaccagggtgtatgtcccagcaatatgtcacaattgcttatgtggtcaggtgacaggtaggaaagtcaaaaaacctggtgtggggcccagagatatgtgacaatgcattctgtgggcagtgccaaggcaaaggagactcacatcacctaagtgcaaggcccagcgatatgtcacaatgccccctgtgagcagcaccaatgcagaaaaagagagtcagttctgggttcagctatatgtcactattccatctgtaggcaagacagtcagatcactcaggtgctgggcagagaaatatgttccaagtaaacctgtgagaaggtgcagggatcaaattaacaatcccacacatgttccggttttaggtataggaggttaacccttcctatatgttgtgtctaagaacaggagttacaatctcaacagtagacaaaatttgtacctaacagcccatactcctgctgtggacttagtctaattagtgaagtcacagcctcataggcgtgctgattcttgctctgaatgtcaccaactcacctgtggactggatccaaatatgagagtcaagttttccacctttgacttcctctatgtgtgagattcagaactcacaatgatgatgtgtactgtttgatgggtgttcatacaatggtaaaagtctcctctgtgtgctgggtcttgttagtacactttttttcttttttttttttttgagatggagtctcacaatgtcgcctgggctggagtgcagtggtgcgaccttggctcactgcaacttctgcttcccgagttcaagcgattctcctgcctcagcccccggagtagctgaaattacaggcgcctgtgagggatcagtcagaatggtaagaaaaactatagggaaaggacgcaaaccttctgaaagttcggaaggttctgcaaagacccaggggagaatagctgaaggcagctgctttataaccctgaggcagagggccaggagtaggtacagtggagtgtaggggaatttatcttaaacaggcttgtttacttatattgaccaggaactgacctttgatcatccacgggagtgacgatccctgaaaggagaacaataaatgttaattacctgcaggttgtgtttgctccaggtttttggcattgtgcctgcactgaaagaaagcaagcagctccagcttcttggggcagctctctggccactagaggcaggccattatctagctgctgttacactgcatacctgtgtctgagtactaattctatccatcagccagggcctgcaggaaaggcccagtaggcggccacatccatgctcagctgattttttgcaattttagtagaggcaggttttcaccatgttggccaggcttgtctcaaactcctgactcatgatctacctgcctcagcctcccaaagtgctgggataacaggcatgagccatggcgcccagctagtacactctctatactactcaaaggctttatccagtataaataagagtcacaatttactctaaagtcatgtttgtaagcacccatgaccatacttgtggctctaagtccaggtattagagccaacatctctccagttggtagggtttatatagtagagtcctcatctgctatgttctgagtttagaagtgtgtcaccatctcaactgtggccggaggctcatatatgacagtcacaattccaactctggacagtgtttgcatttgagattcaagacctcagcaatgggctcttttcatgtgtaagggtgataatcctaatggttggtgaggtgtgcatataagaaacaatctcacctttgtgctgtgtgccttgggataacactctttgtaacactcgagggcattatatgatatgttggagggtggcaattctgtatgaccttcataaaaagagaagaccaagaatgtgactcatttttctaagtcgagctatgagagacagtatttcttctaatagctgactagaggtatgagagtcatcattacacttataagctgactacagtacatgcctccatttaacctgtaggtagagagttagcaggagagtcacatcacctgggatttcagccaagggtatctcacaatcttccctgagggaaagaaccaagcaggaatatcacatcacctgggtgctcatccagggatatgttacagttctctcctgaaagcacagcataggcaacagtcacaacacctaagtgctgagctcagcattatgtcacaatgctccctgggggcaagacagaggcaggagagccacatcacctggtgtctgcttccagggagaagtcgcaatctttcctgtgcagggcaggttgcaggcaagaagtgtcacatcttttaggtcatggatgcagatatatgtcacaaggtcactgtgggcacagcccaggcaggagcatgcaatctcataggtagtgggcctagtaatatttacaataccaaaaatatgtgaggccgaggaaaaacaggagaattgcaacacctagttgctgggtctagtgatatgccacaatcctcccttgccctctgtgaaaatgccctctgtgaaataagaatagactcacattacctaaatgctgggtccagcaatgaagcacaatcccatctgtacgctgggtccaggcaggagagtcaaattactcaggtgctaaaaaaaggtgtatgtcacaaacacagctgaattaaggttgaggtatgagattaacaatttcacacattttttagttctagctgagacataattccctctgtatcttgggtgtaagtacctgagtgacaatctcaatgatagtctgaatttgcatatgagaacctcaatccctcctgcaaattgtgtcattttagtgaagtcaccgactcacaggtgtgctgaatcttggtgtcagagacactaacatctctatggatcgaattcacataatgagattcaattttccaacttttgactgcatctgcataagagcttcagaacctcaacagtgagctgtgtttatgtggaaggatgacagtctttactgttggcaggctatgcatatgagtgtcacaacctcctctgtgtgctgagttctgttaggacattctctgtacctcttgacaactttacacagtatgtgacagagtgttctttatgaccttcatacaaagaggagacccaagacattactcattttcctgaccctggctatgagagatagtgtatctgctattggttttttcgaagtttgaaaatcattattgcacctttaagtttgaacaagatatgcatcacaatcccaccaatgaaaagggactgactagtagactcacagcacctgcattttggggcagtgatatgtcagaatctcctctgagggcagggacagggcagaagtgtcacaccacctgggtgctcaattagggatacgttacagtctcctcctgaaagcagaatacagtcagcagtcacatcacctggatgctaggcccagtgatatgttacaatgatctgtgggcaaggaccaggaaggaaaaacagatcacctgattcctgagaacagtgattcatcacaatctttccagtggtgagggtgcaggcagaaaaggggggttaaatctcaaagataatgggtacaaagatatgtcacaaggccacttatgtgctgggctcaggcagaagcctcccatctcatgtctgttgaactcaatgatacatcactatatccaaaatatgccagaaataagaaaaataaaagggtcacataacctaggtgatggaaaggagacatgtcataatacttccgtgggcagttcccatgtcataaagttgtatcacctaagtgctgaatccaggcatatgtcacaacacacaatgcatttagggcttaggcagaagaggagagtcataacacataggtggtgagtccagcaacacatcacaaatccctgcttgggcaaagccatagaaaagagtcgcatcacctatgtactgggctcagtaatgtgtcacgctacccccttaggaggagggcccatgcaagagagtcacatcacctatgtaacgggttcagcaatatgtcacagtacccattctggcgcaaaagagtcacatcttctaaattatgggcaacagagccaggctccatctcaaaaaaaataaagagtcacatcacctaataagcggtctcagagataagacaccatggccctcatgggtagggctcaggaagaagtgtgaagtcacataacctttgagctgggcccagctatgtgtcaaaattacttcagtgggcagggcccagacctaagaaaagagtcatatcatgtaggtacttggccaagcaatatgccacaatccccactgtggacaggtcccaggagaagagtcacacaatctcagcaattggcccagatatatcttacagtgacttttgggagccagcagaagaatctatcacctgtatgctaaactcagcaataagtcactctctctactatgggcaaggcccacgcagaaaaggagagtcaaatcaccttggtgctgggcccaaagatatgtcacaatctctttttgggcaatgtccaggtaagagagtagagtcacataaaatagtcaaaaagggccaagcgaaatggctcacccctataatcccagcacattgggaggctgagtcgggcagatcggctgaggtcaggggtttgagaccagtctggccaacatggtgatacctcgtctctactaaaaatacaaaaattagccaggcgtggtggtgcacacctgtaacctcagctattcaggaggctgaggcaggagaatcacttgaacccaggaggcaaaggttgaagtgagttgagatcacaccactgcactccagcctgggtgacagagtgagactctgtctcaaaaataaaattaaaataaataacataaaataaataaaatagtcaaagggccccagatatgttacaatacaccttgtaagcagggtccaggcaggagactcatatcacatttgttctgggcccagcaatatatcaccataccttctgagggcagtgccatgacaaaagagtaatgtcaccttagtattaggcctagtgacatttcacaatatcccctgcaggcaaaacacaggaagaggagaaaagtcacattagctaggtgctgagcccagtgatatgtcacaatcccttctgtgagcaggggccaggcaggagaagagagtcacattacctgtgtgatgggtgcagggttatatcacaatgtccgctgtaggcaggaccgaggcagtagagttacatcacctgggtgttggacccagcaatatgtcacaatggcctacatgggtagggcacaggcaggagactcacataacctatgtgtggggcccagcaatatgacacaatgccccctgtgaaagagccaggctggagagaagattcacaccatctgggtacaagacccagtgatatgtcacaatgcccactgtgggaagtgccaaagcagtagaacagttacatcactttggtgctgggtccagtgatatgtcacaatcccttctgtaagctgggcaggagcatcaactcactctggtgtcgggtaaagtcatatgtcataattacactatcaaaaatgttcagggatgagattatacatctggactgggaagaatcaacacatcaaaaatatgaccaggccgggcacagtggctcccgcctgtaatcccagcactttgggaggccgaggcgggcggatcaccggaggtcgggagtttagaccagcctgaccaacatggaaaaaccccgtctctgctaaaaatacaaaattagccagtgtgctggcacatgcctataatcccagctactcgggaggctgaggcaggagatttgcttgaatccaggaagcggagattgtggtgagccgagattgcgccattgcgctctagcctgggcaatgagagtgaaactccatctcaaaaaaaaaaaaaaaaaaaaaaaaaaatgaccaaaccaggcacagtggctcatgcctgtaatcccagcagtttgggaggccaaggcgggagaatatctggagcctaggattttgagactatcctgggggccacatggtgagacaacacctatattaaaaaataataattacagttaaaaaaatatatatatatatatgaccagcgcctgaaaaacatagcaagaacacatctctactgaaaaaaaaaaaaaaacatagatgattgattggtagacagagagacacacagatagacagatagatagatatagatagaaccagtcatggtggctcacgcctgtaagctcagtaatttgagaggtctaggccagcacatcgtctggctgcaggagtttgagatcagcctggaaaacatgatgggaccctatctctacaaaaataaaaagtaaaatatacaaaataaagcgccagtgtggtggcgcatgcctttagtcccagctactgggaagtggggtgtctgagacgggaggatcacctgagcccagggaggtcgaggctgcagtgagctgtgatcatgcacctgcactttagcctgggtgaaagaaatctaaaacaacagcaacttcagtgtacgggaaggagcaagagagacaaagagaaaaaaagaaaaaaacaacagaactcaatgtactgtgaaaacaaactcaaagtggtgctaaaaaaaaaaaaggaaaagaaaaagaaacagaaagatcctgagagccccagctatttgggaggccaaaataagaggatcaactggatgagcctaggaaggtaaagagtgcagtgagccatcattgaactcctctgctggaccgaagctgtactgtcccggtgagagccatctggtccaccgtaaacatttccagctggcaaccaagtcctacgctcgtggcccacatcctgtacacctggcagccagaaagagaagccagctggtggtggaggcagaagcagaagcccactgtgtctaccgtacaggccacatgtggcactcgcggcctgaagctgtccctgttggaaccttatttcccccaaggcggcccacctccgcagccagcctctaagtctgccgaccttccttcctaagctttgaatccctggtccacccaaacgagaggccagcagccacaactactggccacagctcgccacccacatctggtcacccggtggccagaccgagaagccaacgtgtccaccctgcaggccatgtgtggcgctcgcccctgaaaacgtccctctggcgtctaagtctgtgagcttcccatcactccctgggtgacagagtgagactccatctcggaaaaaaaaaaaaaaaaaaaaaaaagatgatggggaagaagggagggagggagggagggaggaagagaggaaaaggaagaatgaaaaggaaaaacaagaagaaaataaaagaggacagagcatggtggctcaaacctgtaatctcaacactttgggaagctgaaatgggagaattgcttgagcacagaattttgacaccagccctgggaacacaaagcagaaggaaaggaggaaggagagaagaaagaaaggtaggaaggaaggaaaaataaaaccaaaaaagttcagggaacatcactcgcactgatgatcaaaggtcagttcctggtcaataaaagtaaacaagcctgtttaagataaattcccctatactctgttgtacctactccttgccctctgcctcagggttataaagcagctgccttcagctattctcccaggaggctttgcaaaaccttctgactagaaatacaaaaattaggtgggtgttgatgagcctgcttgtagtcccaactactagggaggctgtggcaggagaatggcttgaatctgagagactgaggttgcagtgagccgagatcatgccactgtactacagtgtgagtaacagaatgagaccctggctcaaaaaaaaaaaaaaataaaataaaaataaataaataaataacttcttacctaaatctagattcatcatattttacaaaatctagaaacaacctcagaacaataacaactccattcccagaaagagcctcccaaccccacctttgtgccaatcccaactgcatctgcctgtggatttcaaggttttcaaggctctgtggcttctctaagtataaaggctctgtccatggctattgtgagcaggccaggacatctgcaggggaggctcctcaggcagaagagctgctttttcaatgatctccctttgcaggcaaaactatccttagcttgcagtcactgagttcaggcttctacttcccagtcaggattattcacttagtttgaaataagaaaatgaccaatgtatggccagacatgatggctcacgcctgtaattgcagcactttggaaggctgaggcaggtggatcacttgaggtcaggagttcgagaccagcctggcaaacatggtgaaaccctatctctactaaaaacacaaaaattagccgggcgtggtggcatgcgcctgtaatcccagctattcagaaggctgaggcacgagattcccttaaacctgggaggctcccttaaacctgggaggcgcaggttgcagtgagccaagatcgtgccactgcactccagcctgggtaacagagtgagactcagtctcaaaaataaataaataataataattaaaaaaatgaccaatgtttcaaaaaagtgcaaaatcactccaacacactgtttatagaatagtgtaaggaaattgtaagacttaaattttcaactacaatataaaaagcttaagtaaggctgggcatggtggctcacacttgtaatcccagcactttggaaggccgaggcaggaggatcacctgaagtcaggagttcgagaccagcctggccaacatggtgaaacccatctctactaaaaatacaaaaattagatgagtgtggcagctggcaactgtaatcccagctactagggaggctgaggcaggagaatcgcttgaattcaggaggcaaaggttgtactgagccgagattgtgccaatgcactccagcctgggcaacagagcaagattccatctcaaaaaaaaaaaaaagcatctgtccttttcagatgataaacatctcatttaactatttccatgatagataatttaataaacaatcatatgtgaacatttctagaagatgtcaagttccatctcataaaatttagcattaaacttggacatctagacaacagaatacagaacagagattatccactgttacaaattctagacaccacaaaaaagaggagctgatggtttgagaaatatatacaatgcaccaattaatctatcacatttgcttgtggaaatatattcactttgtatagccataatgaaaaaaagatttttcctatttcttttctctggtagcattcccaaagcaaagcctggggttctatttaaaatcatgcaaccaggaaaagcagacatgagaaacttactacactcactctggagaagataaaggtaaataagaatctttaatacataaaatatatgagtagatttttctgaaatatacctttcatagtctgactttttaaacatcttttaaactcttctgataaaatataagttacagttattaaaaaactgaaatagaaatgtgaaaaaatctttccaaggtaaaaaactcaggaagaggcacatgccacaatgcctgactaatgtttttgtatttttagtagagacggggtttcaccatgttggccaagctggaaataattttttactctgcggccaggtgtggtggctcatgcctgtaattccagctacttgggaggctgaggtgagagaatcgcttaaaggcggagggaggctgaggtgagagaatcgctgggaggcagaggttgcagtgagccgagactgcaccactgcactttagcctgggcaacagagaaagactgtctcaaaaaaaaagcatactctgcactagcagcattaacacaaaaagttctagtaaaccctgacacccactcaaatgtcacatcctctataaagccctccttgattttcccagtgctatgtcactggcagaattgatcactattaccatttagctcctcaatactttataagtctttttatgtacaagggttattctctccagaataaattaatcatttacacacctatccatgctaatgaactataaactcctatggggcaggtatgttgaaccctgttcatctgtgtaatccaaatgtctgatacttaataggtgtcatatacacataaaatcaaaatgctgtcagggaattattggaaaagctaccaaattcttttttttttaacttttaagttcaagggtatatgttcaagttttttacataggtaaacgtgtgtcacgggggtttgttgtgcagattatttcatcacccaagtattaaggcctagtacccattaggtatttttcctgatcctctccctcctccaataggccccagtatgtgttcttcccctctatgggcccatgtgttcccatcatttgactctcacttataagtgagaatatgtagtagtttgttttgcttttttttttttttttgagatggagtttcgctcttgtcacccaggctggagtgcagtggcactatctcagctcactgcaacctctgcctcccgggttcaagagattctcctgcctcatcctcctgagtagctgggattacaggcatctgccaccacgcctggctaattttttgtatttttagtagagatgaggtttcaccatgttgctcaggctggtatcaaactcctgacctcagatgatccacctgccttggcctcccaaagtgctggaattacagctgtgagccaccacatccagctagtatttagttttctattcctctgtttgctaagaataatgtcttatggctctatccacgttcctgcaaaggacatgatctcatttttttttaatgggtgcacagtactccatggtgtatatgtactacactttctttatccagtctatcattaataggcatttaggttgattccatgcctttgctattgtgaattgtgctgcaatgcacatatgcatgcatgtgtctttataatagaatgattcacattgctttgggtaaatacccaataatggattgctaggtcaaatggtattttgtctctaggtcttcaaggagttgccacactgtcttccataatggttgaactaatttacactcccatcaacagtgtatacgcgttcctttgtgaaaaaataattttaattttctaaaaggttagctttctaagacaaatggtatgcgaggaaatttccacaggcctaagccatccagctgctcttctgagaggctacactcttcctcctcaggctgtcctctaagagatgacccaggggatgatattcattagacactccaagagatatggccactgtgggcatcttgggttatccctgacggttctgaaaatcatgaacaagaaaagaccggagggctgccacaaagggccctggaatttctccaaagcaaaacttcaaccgaaagacctactaacaaggtgtatgcaccagggaagataaaaggacagtcacagagattttttttctttttaacagtggagttccagaggattattttctcacgtaacatgtttacagacttcggaggttgaggcgggtggatcacctgaggtcaagaattcaagagcagcctggccaacatgaggaaaccctgtctctcctaaaaatacaaaaattagccgggcatggtggtgggagcctgtaatcccagctacttgggaggctgaggcatgagaatcgcttgaatctgggaggcggggattgcactgcactccagcctgggcaacaagagtgaaactccatctccaaaaaaaaaaagaaaaaaaaaattgtatacagacaacaattattttaaaacctgccatccactgctgtgtaagaacatgattaataataaaaacactgtgtttgaaatgtaaaataaaggacaaatagttgatagtgttgtaaattggagagaggaagttgttctcatttccacttttgagaatgtaggaacaaaggtggaaatttataattttactacaagcctgagttaagctagggtaaaagggtagtggattagaagtcctgcttgccatacattaggaagtcacagaggaaaaccagtcctcctgtggagtgttatttaaaaagcaggaaattagactgaaggggctctagtgccctgtgttcataagtaaaaaatgtaaaacctatctcggattcacttcttataaattattttaggcagaaacaaaattcaggcttaacctgcaattaacctctgattacataaccaggaaatttccacccgaatcatacaaataaggtgactacataaactgtaaccaattcttgaatttggtttgccttctcacacgcccttttcaaaacccttccctttttgcctttcaggtggcccacatattatggctgggtgctttccatttcactaatcactgctcagataaactcgttaacgttttaacgttgactccctttactttgcaagagaagaagctgggcgcggtggctcatgcttgtaatcttagcactttgggaggccgcggcggtggggggatcacttgagtccaggggttccagaccagcttccaccatggcgaaaccacttctctactagaaatacaaaaatcagccaggcgtggtggtgcaggtctttaatcccagcttttcggggggcttaggcacgagaatcgcttgaacctgggaggcggaggttgcagtgatcacgccattgcactccagcctcggcgacagagcaagactttgtctcaaacaaaccaacaaaatgtttaacaaaagagactgggagccccaccggccacagctcctcctacgcacacacgagtcgggattctgccctgatgacccgcctggcatccctgaacaatctgggaaacactcggggctgcgtgcagagctgcccagggagctccagatagggcgccgcagggactgggcgggacgcgcgggtcattgctgcgggcccagccaccatcttgcggccagagggacctgggacggagctgcgccagcagggactcaggtcggcaacccaggagcggtgaggaggccagtcccgtcggtttctcagccagctctcccctctcgggatgctcaacccctcacactcaccctttcccaccttctggaatgtcctggcatcttagctgtctgtgcacgtcccaggacctgcagatcacagggcaacagcctgtcaccggctggggcgagaggggggcagaggtggaggacgttgaatagcagaaagcgatcccaagctctggctgcagcgagagacaaaagccccgccaaatgccggatgccacgccctcctctccaactgtgccactgattcgataaagcaccagcactcgcccagtaccactccctccacccccaggaaaacaggctaaagcagggagtgtcaaccatagggaattacagccaattaagaagtaagctgagacttgaaatgaacttgctctttcccttacctgggtctgcttgtataatgcatcttatttgctacttaagggtaagaaaagaacatttggattatttttgtttgtttgagactgagttttgctcttattgcccaggcttgagtgcaatggtgtgatcttgtttcactgcaacctctgcctcccaggttcaagtgattctcctgcgtcagcctcccgagtagctgggattacaggcgcatgccaccacacccagctactttttgtatttttagtacagacggggtttcgccaagttgggcaggctggtctcgaactcctgacctcaggtgatcctcccaccccagcctcccaaagtgctgggattacaggcgtgagccaccatgcctggcccatttgaacatattttaacaactttttaatgattttgataatgcaggaaagaccctcatcccatccctgagtacctctctcatcatgctataccacgctgttgaccacatcgtgggatggccattaggaatggggcaggggtgggggaaagcggtggctgagaatggttaagcaaaaattatgttacccaaatttgtttattttagaaagacttctcaatcattctgtgtgaagtgtgtattccagggtaattgtgccctgactgcactgcatctcaatctgacttctcttttttaaaatcactggattactgtcactaatggggtattttattttctattttatttctatttgaaaatggccaactgtcctttgtgggtgtcctgatttgatttgctgggttagaccatggaggtaagagtgaggaaatattgggtcacatcagaataacttattctcatttagagaatatataggaattttttcttttttgagatggaggtttgcttttgttgcccagaagggagtgcaatcgtgtgatcttggctcactgcaaccttcttctcctgggttcaagcgattctcctgcctcaacctcccgagtagctgggattacaggctcccaccaccatgccctgggtctgtcagggtttcatcatattggccaggctggtcttaaactcctgacctcaggtgatccacctgcctcggcctcccaaagtactgggaatacaggcatgagccaccgcgcccagccaggaatttcttaataatatataacagttttctcaatacccattttatatgtatatgtatgtgtatatatatatatatatatatatatatatatatatatatatatatttttttttttttttttgagacagtgtttcacttttgttacccaggctggagtgcaatggcatgatctcagctcacctcaacccccacctcctgggttcaagcgattgtcctgcctcaatcctcccagcctcccgagtagctgggattataagaatgcgccaccacgcccggctaattttgtatttttagtagagatagggtttctccgtgttggtcaggctggtcttgaactcctgacctcaggtgatccgcccacctcggcctcccaaagtgttgggattacagccatttgccaccgtgcccggccaataccattatatttaacagtgatagcttacagggcagggaggggacacatatgacacaaccttagaattttaatttggtcgtaagtttttttgttttgttttgtttttggagacaaggtctcactctggtacctaggctggagtacagtggcacaaccatagctaataacttggttgtaacagttccttaaaaaatatttttggcagagtttgatggctaacacctgtaatccaaacactttggaagaccatggtggaatgattgcttaaacctaggagttcaagaccagtctgggcaatgtagtgagattcagtctcaacaaaaacgttaaaaattggcctcatgtggtgttgcatgcctgtagtcccagctacttgaaaggctgaggtggaaccatcactggaggttgaggctgcagtgaccagtgacccatcattcagctactacactccagcctgggtgacagagtgtatacacacacacacacacacacagagacacatacatatatatatacacacatatatatgtaccctatgtatataatcaaaataatatgtatgttgaaagaaattcaagcacagaagaaaagtgaaagaccctggttgggaatgtggtaaaagatgagcatggctcttacggctcagtgagatttgtttttccatcttgaggaactgctctcccacactgaaaccacaacccagcacatgccagttctcacactatttatactttgctcaaaggcagcagaaataggccaacatcatggtttctgacatggaagtctattccccactgagacattttaaaaatgttattctccctctccctctccccctccccctccccctcccccccatccctctccccacggtctccctctccctctctttccacggtctccctctgatgccgagccgaagctggactgtactgccgccatctctgctcactgcaacctccctgcctgattctcctgcctcagcctgccgactgcctgcgattgcaggtgcgcgctgccacacctgactggttttcgtatttttttggtggagacggagtttcactgtgttggccgggctggtctccagctcctaatcaggagtgatccgccagcctcggcctcccgaggtgccgggattgtagacggagtctcgttcactcagtgctcaatgttgcccaggctggagtgcagtggcgtgatctcggctggctacaacctccacctcccagccgcctgccttggcctcccaaaatgccgagattgcagcctctgcccggccgccaccccgtctgggaagtgaggagcgtctctgcctggctgcccatggtctgggatgtgaggagcccctctgcccggctacccagtctgggaagtgaggagcacctcttcccggcaccatcccatctaggaagtgaggagcgtctcttcccgggcgccgatcgtctgagatgtggggagcgcctctgccccgccgccccgtctgggatgtgaggagcgcctctgcccggccgcgaccccgtctgggaggtgaggagcgtttctgcccggccgccccgtctgagaagtgaggagcccctctgcctggcagccaccccgtctgagaagtgaggagcccctccgcccggcagccgccccatctgggaagtgaggatcgtctccgcccggcagctgccccgtccaggaggtggggggcagcccccgcccggccagccgccccgtcccggagggaggtgggggccagcccccgcccggccagccgccccgacccggagggaggtgggggccagcccctgcccggccagccgccccgtccgggagggaggtggggggctcctctgcccggccgccgccccgtccaggaggtggggggcgcctctgcccggccaccccttctgggaagtgaggagcccctctgcccggccgccaccccatctggggaggtgtacccaacagctcattgagaacgggccatgatgacgacggcagttgtgttgaatagaaaagggagaaaagggggaaatgtggggaaaagatagagaaatcagattgttgctgtgtctgtgtagaaagaagtacacataggagactccattttgttctgtactaagaaaaattcttctgccttgggatgctgttgaccttacccccaacctggtgctctctgaaacatgtgctgtgtccactcagggttaaatggattaagggcggtgcaagatgcgctttgttaaacagatgcttgaaggcagcatgctcgttaagagtcatcaccattccctaatctcaagtacccagggacacaaacactgtggaaggccccagggtcctctgcctaggaaatccagagacctttgctcacttgtttatctgctgaccttccctccactattgtcctatgaccctgccaaatccccctctgtgagaaacacccaagaatgatcaataacaaaaaaaagaaaaaaaatgttattatattaagccctcttccttctaataaagtctatacaaatacacacatacaagcctgaaactactctaaataaaatatcaggtttttaaaatcccataaagaaacaagcaaacacaaaatcagccactttgattgaggagagagtgggatggagggggttaggaggctgcccgtatcacctccgggcggcatgtggaggagcagatggagtctaggaagaccctggggagtcacttgttctgactgggctttctcctagctcgacactttgctaaccatttcctgggaagagcttaggaaactcctgtgctctagtgaggcagagcctcccctcacagggtattggcaaggaggcattctgagactgtgattgagaagctagcacagtgcttgacaagtacctgtgggaactgtcatcctctgtaactatcatgtggccttggagtgttcagatggcctggcctggcctggggcttggtggagatgtttgagggtcagctgctttaggctcccactttctcctcaatcaaagtggctgtttttgtgtctctttatttatggaatttaaaaacctgatatataaatagaaagtgcagctggaggtgccgaggctcagtgtctagaactgtgctgcttgggcttgcttgctggcctgtggccaggtgaactctgggtgtgaggtgcttcccaccctggatctacgatccccactacctctcccaggccctgagtaaccaacacaaggcggtgctaaagagccggtgagtgacagccatgaagcccatcaaggaagatttgaatgctatctgggctagggctgtcaggggtaggaactatggtggccttgtcttatcatggccccacccacagatgtgactgcctgtgctgcttctccagcagccagctgtctgtggccctgagcctgtcgtaccatgcctgcttcctcatgctgttcatgtttaaaaaaaaaaaaatctgagatggcgctgctggatgtgagtgctggaaatggggcgccacctttgtcctagggaattaggagctgaccagatacctcctgagtgccccctataacaagtggggagtggtgttgcactaaatgatgtcccccctcctcccaccaccgaagatgtgtttgtattggttcaatgaatatacaatgcagagacctaaatgaagacacatgaatgggtgtatgtggacatcagcttgcagctgggaaacaggtgcctctcattctccccagcaagtgtggaaggtgtccatgcccatgagtgtatagatctggcctttttcttaatttgttcacaaccccaggtctgttctgagtgaatgatgtgcagatgagatttctcaggtcattggtatgtttgaccttgtggctgctgcttttgctgccactacccccaagcccaacctggcttaaagtccaggctttaggtcaaaaagacggagggcttcctgtgttctgggatgggaagttctcgatctgtggtaggactgggtgttggggtacactttagtttcgtgtaggatgtgagctgcagtggttttattaattgtgattgccctggcctggttgtagctccgggtggggagaaggaatcaacagtggtgtttccccagatatccatgtgcccagccctggccttcctgccctcagacccagaagtaagcaccaccacagactctgacttgcctccctactccccataccccagatgggaataccttgaaggctacaatctggaagtattattctcctcattttaaccagacccacataaacacacagtgtgggagtgagggtaggatgggttggggacctggggagaaccagagtggaatcataaatccttgggaaaagttaaagatacagaagtggtggtaacctctccatgaagcccagctccctacctgatttttgccacacagtccctcctacagacactgtagggtggctctgggggttgttggggatccctataggcctgggctgctctctgtccccacctgcctgtgctccttctctcttttgttgttgttgttgttgtttgtttgttttgttttgtttttcagatggcagtttcattcttgttgcccaggctggagtgcaatggcacgattttgactcactgcaacttctacctcctcggttcaaatgattctcctgcctcagcctcctgagtagctgggattacaggtgcacaccaccacacatggctaatttttgtatttttagtagagaagggttttcgccatgttgaccagcctcatctcaaactcctgacttcaggtgatccgcctgcctcagcttcccaaaatgctgagattacagctgtgagccaccacacccggcccctgtgctccttctctttgcctgctgtcagggccctaacgtggagaaggaggcaggtcctcagcctcaggtatagctgaatgtcttttggagtgtttgaagcatgctttatgtcttagaaattctaaaaagtaaaacgaattccaattgtaatgtctgttagttttcctgagccaactggaagaaaaggatttttcacctgaaatttttaaatgacacccaaggatagccaccagtgtcttggccatggaaacctcctatgtgcttcccacccctggtttgatttgcaacctcatgattgtgttgccctgaacatactttcctctggtgaatatggttcacatggttaacaccacttcatgagaggggggcatcatgtagagatgagaatggattgtctttagttaccattgtgcctctttgtcacctgagaggctcacttttcctggctgattccataagtgtgttagtgttgtcagacacctctggacaactcaaatgacaaggggctgttgttttataaaggaaacaaaggctttggatgtgaaatccttcttttctttttcccttcttttaggtgaaatacttcagtttttttcttaagggtaaacagtggtatcttagcaggtttagcgtaagaattggcatgtgctaggttgtggtttcagtgtggatgggcagttcccaagatggagaaccaggtctcactgaattgcaggagccacactttctctttttcatatcccccaccatgtgcacgtgtgtgtgtgtgtgtgtgtgtgtgtgtgtttacacatacaggtctcactctgtaacccaagctggagtgcagtggctgaatgatgggtcactgcagcttcaaactttcagtcttaagtgatcctcctgcctcagcctccccagtagctgggaccaccggcatgcaccagcctgcctggttctttttttttttttttggtatttttttaaagtagagacagagccttgccatgttgggtaggctggtcttgaactcccgagctcaagcaatccacccgcattggcttcccaatgtactgaactacagacataagccactgtgcccggcctagttttattatctgattacacaagtatatttcttcataacaattcactgagctttacttgaatgaagaatttcttcatgtatttctctatgcatgttacatatcaataaaaaattacatagtacatatttgcacaaaatgctaactcactatctcaaaataacagcagtaatttttttttgcttgtttcatggtgagacacactcagaacatgatcatacttctctgctatcatgacacacttatttcacagttttttatggctctacaaacaatagaaataaagaaggggtctcttgtgtgcacttatggggtatacttaaatgtagagaattttgcagccaacattatatatgaaaaaacttacaccttgataggtaaaagatgaagggccagcctgtgtgagaaatttttatgggatatttgttccctcacaatatcagaaacagaatattggtccactgctcttaacctacttcataagttaaggacaactttttcacaataagttaaggagcatttccaggatgcccttactcttctgaatggccatgatttgttaggtctttctttccatggtataaagtaaatgaggcaatggttagaaatgtatccccccaatagggctctatagaagattatactgtaaaggctatgattacacaatagattttaaatttacttactaaagttgtgctaaataatattatttcattctttctttttttttttttttgagatggactctcgctctgtcgcccaggctggagtgcagtggctcgatctcggctcactgcaagctccgcctcccaggttcacgccattctcctgcctcagcctcctgagtagctgggactacaggcgcccaccaccatgcctggctaatttttagcatttttactagagatggggtttcaccatgttagccaggacggtctcgatctcctgacctcgtgatccacctgtctcagcctcccaaagtgctgggattacaagcgtgagccactgcgcccagcaataatattatttcttttaattacttattggatgaacagagaagtacctatgaagttgctaacacttgtagttgcacatggagaaatacgtagtgtaggctccctgagcctactctgcatccacggagatgcagttgcagcggattaatgaacagtgtgcttggttgaaatgagtagaccacttatctagctaactattcggcctatttaattttagttggtgtttcgtggggaccctggctaaaaagcatgcttcaaactcttggtatcattctcctgatagttgaaatagtagtgtctccctacttcaccgtattctctcaaaagttataaatgtttgcatgcagtcatctccaaaatgtcaaatgatctcttttaaaccagaatggcagaaactcaaagacacatgtgactacgaagacaccataacctatgaatgacatgataaggacaaaaacccaaaataggacaggtgcggtgcctgtaacctcagcactttgggagactgaagtgggtggatcatgaggtcaggagtttgagacaagcctgggcaacatagtgaaaccccatctcttctaaaaatacaaaaattggcctgttgtggtggctcaggcctgtaatcccagcactttgggaggccgaggtgggtggatcatgaggtcaggagatggagaccatcctgggtaacacggtgaaaccctgtctgtactaaaaatacaaaaaattagccagccgtggtggcatgggcctgtagtcccagctactcggaaggctgaggtgggagaattgcttgaacccaggaggtggaggtagcagtgaactgagatagtgccactgcactccagcctggacaacaaagcgagatttcatcttaaaaaaaaaaaaaagacagaaaaaaagataatggaaacagagtggcactaaggccctgagttttggtcacaccgtgacctatgtgagagcttacaaatagggtaatttttttttttttttgagatggaatcttgttctgttgcccaggctggagtgcagtggtgcaatctcggctcaatgcaaactctgcctcacgggttcaagtgattcttctgcctcagcctcccgagtagctgggactacaggtgtgcaccaccacgcccggctaatttttgtatttttactagagacggggtttcaccatattggccaggatggtctggatctcctgaccttttgatccgccagcctcagcctcccaaagtgctgagattacagacctgagccactgagcccggcctggggtgaattttttaaacaaaattatttatggccatcatctggactgagcatgtgcactcttcccaaacagaccaaaacaaaacaaaatgagtcactcatgccaaaagtgagctaatcaaacctaaaatttaagaaaatagctagatcttagaccagtttttctttgggaggcggaggcgagtggatcacctgaggtcaggagttcgagaccagtctgaccaacatggagaaacccctgtctctactaaaaatacaaaattaaagccaggcgcggtgcctcatgcctgtaatcccagcactttgggaggctgaggtgggtggatcttatcaactttagcatccaggaaggagcataaaagattttaaaaagagagagagagcaaagaacacagaagaaaaaccacagcaactccctctaagtgctgttgaagccaactaaaagtggggctagaaaaaaaaacagaggaagaagcttgagtagtttcacgtactcgggaggccgaatggaaagaccacctgggcaagactgaggagatcgaggctgcagggaatcacaatcgcatccttctcctggacctgaagagtactgccactggtgaccgctttctggtctaccttagacatggcaagctggtggccaagtccaatgctcatggctgaagtctgtcttaacataaataaactaacaactaacagtaaatatttaacaataataagtaataacaaataataacaagacaaataagtgagagggaacacagataaaaggtaattaatgtcacaattaattgttgtctctctttctctgtctctctcttcctcaatctccatgtgtcacactttcacacccaggctggagtgcacgtgtgtggtcacagctcattgctgatcactcacctgcactccagccagaatgtgatacagtaggaagacctagctaaaaataataattttatatatatatatatatatatatatatatatatatatatcacgtcaatttcagcatgcagaaaggagcataagaaaataaaagagagagaaagagcaaagaagaaaggaaaaaaaaaaaaaccacagcaactcactgtaagtactgcggaagaaaactaaaagtggagctggaaaaaaaaaagaacagaggaggaaagtccaagtattttcaggtactctggaggccaagatggatgggacgaccacctgtgaaagaccagggagattaatatcgcagtgaatcacaattgcatccctctgccttacctgaacactactactggtgagagctatctggtagaccttagaagtggcaagctggcagccaagtccaatgctcgcagccaacatctgcctcaaaattaataaataaccgacagtaaataataagaaagaaatgataatggacaataatattaccaataaataaataagtgggagtgaacaaaaataaaaggtaattaaaatcacaattaactgtatctctctctgtctctatttctctgcctctctctgtctttctgttttagtctgggtctctgtctctctgtctttctgaatctctcttccctgatctccgtgtgtcacactgtcaaacccaggctggagtgaacgtgtgtggtcacagctcactgctgatcatgtacctgcactccagccagggtgtgacagactgagaagacctggctaaaaaaatatatgtgtatatataaaacatcaacttcagcatacaggaaagagcgtaaaaaaaaataaaataagagagagagagagaatgagagcaaagaacaaagaagaacaactatagcaactctctctaagtactgtggaagcaaactgaaagtggggttagaaataaaacagaggaacaatgtctgagtagtcccaggtactcgggaggccaagatgggaagaccacccgggtgagactggggagatccaggctgcagtgaatcgtcatcacatctctcttctggacctcaatggtaccactgccagcaagagccaaatggtcaaccttaaacatggcaagctggcggccaagtccaacactcgtggctgacatctgtctaaaatgtataaacaaataaacaaacaatattttttttttttgagctggagtttcgctcttgttgcccaggctggagtacagtggcgtgatcttggctcaccgcaacctctgcctcccaggttcaagtgattgtcctgcctcagcctccggagtagctgggattacaggcatgcgccaccacgcctggctaattttgtagttttagtagagttgatgtttcttcgtgttggtcaagctagtctgaaactcccgacctcagctggtttgcccgcctcggcctcccaaagtgctgggattacaggtgtgaaccacctcgcctggcacataaatatttaacaataacaaagaaataacaaacaatgataagaccaataaataaataagtgggagtgaacaaaggtaaaatgtaattaatataacaactaattgttgtctgcctccctgtctctctctgtttctgtctctctgccactgtctgtttgtgtctctgtctttctgtccctctctccatcgatctccatgtgtcacactctcacacacatgctggagggcaggggcatggtaacggctcactgctgatccagcacctacactccagccagggtgtgacagtgagaagacctaccaaaaatcaaatttaaacatccacgtcagcgttcaggaaggagggtaacaaaaaagaaaaaagaaatggagcaaagaacaaagaagaaagaccacagcaaccccctctaaataccgtggaaacaaaatgaaagtgggagtagaaaaaaaaaagaaggaagatggcctgagtagtccaaggtaaatgggaggctgagatgggaagtcctccgggtgacatcgggaagatcgttgctgcattgaatcatgatggcatccctctgctgggcctgaacaatactactgccagtgagagccatctggtcaaccttatcaccagcgagagccatctgtttgaccttagacatggcaagctggcaactaatccaacgctcgcagccaacatctgttacaaaataaatatacaaaaaaacccaatagtagatatttaacaataactaagaaataataggctgggcgtggtggctcatgcctgtaatcccagcactttgggaggccgagacgggcggatcacgaggtcaggagattcagaccatcctggctaacatggtgaaaccccgtctctactaaaaatacaaaaaattagctgggcatggtggcgggcacctgtagtcccagctacttgggaggctaaggcaggagaatggcatgaacctgggaggcagagcttgcagtgagccaagatcgagccactgccctccagcctgggtgacagagtgagactccgtctaaaaaaaaaaaagaaataataacaaataattttaaagaccaataaataaatgagagtgaaaaagggtaaaaggtaattaatatcacaattaagatcttctttatttttctctctctctgattgtcacactcatgctgcagtgtgtcaaaaaaaaatctaagaggtcaacttcagcatgcagaaaggaacatagaaaaatagagtgagaagaacaaagatttaacacaacagcaagtcactctaagtactgtggaagaaactgaaagtggggttagaaccaaaacagaggaagtaggtcctagtagtcccaggtacttgagaggctgagatgggaagactacccttgtgagaccaagatcgaggccacggtggatcataatcacatccctctgctggacctgaaacggtatggccaccagcgaggccatctggtcgacttcagacatggcaagctggcagctaagcccaacgctcatggtcaatgtccatcacaaaatatataaacaaaccaacagtaaatatttaacaatatcaaagaaataataacaacaaacattaaacaccagtaaataaataagtggaagtgaacaaaggtaaaaagtaattaatattacaattaagatcttcttcactctttttctctctttctctctcttcatttgtcacacccagctggagtgtgaccaaaaaatctaaaaggtaaactttttaaaaaatttttattattattatactttaagttttagggtacctgtgcacaatgtgcaggttagttacatatgtatacatgtgccatgctggtgtgctgcacccattaactcgtcatttagcattaggtgtatctcctaatgctatcctttccccctcctgccaccccacaacagtgcccagagtgtgatgttccccttcctgtgtccatgtgttctcattattcaattcccatctatgagtgagaacatgcggtgtttggttttttgtccttgtgatagtttactgagaataatgatttccaatttcatccatgtccctacaaaggacatgaattcatcattttttatggctgcatagtattccatggtgtatatgtgccacattttcttaatccagtctatcattgttggacatttgggttggttccaagtcttagctattgtgaatagtgctgcaataaatatatgtatgcatgtgtctttatagcagcatgatttataatcctttgggtatatacccagtaatgggatggctgggtcaaatggtaattctagttctagatccctgaggaatcgccacactgacttccacaatggttgaactagtttacagtcccaccaacagtgtaaaagtgttcctatttctccacatcctctccagcacctgttgtttcctgactttttaatgattgccattctaactggtgtgagatggtatctcattgtggttttgatttgcatttctctgattgccagtgatgatgagcattttttcatgtgtcttttggctgcataaatgtcttcttttgagaagtgtctgttcatatcctttgcccactttttgatggggttgtttttttcttgtaaatttgtttgagttcattgtagattctggatattagccctttgtcagatgagtaggttgcgaaaattttctcccattttgtaggttgcctgttcactctgatggtagtttcttttgctgtacagaagctctttagtttaattagatcccatttgtcaattttggcttttgttgccattactttcggtgttttagacatgaagtccttgcccatgcctatgtcctgaatggtaatgcctaggttttcttctagggcttttatggttttaggtctaacgtttaagtctttaatccatcttgaattaatttttgtataaggtgtaaggaagggatccagtttcagctttctacatatggctagccagttttcccagcaccatttactaaatagggaatcctttccccattgcttgtttttctcaggtttgtcaaagatcagatagttgtagataagcggcattatttctgagggctctgttctgttccattgatctatatctctgttttggtaccaataccatgctgttttggttactgtagccttgtagtatagtttgaagtcaggtagtgtgatgcctccagctttgttcttttggcttaggattgacttggtgatgtggtctcttttttggttccatatgaactttaaagtggttttttccaattctgtgaagaaagtcattggtagcttgatggggatggcattgaatctataaattaccttgggcagcatggccattttcacaatattgattcttcctacccatgagcatggaatgttcttccatttctttgtatcctcttttatttcattgagcagtggtttgtagttctccttgaagaggtccttcacgtcccttgtaagttggattcctaagtattttattctctttgaagcaattgtgaatgggagttcactcatgatttggctctctgtttgtctgttattggtgtataagaatgcttgtgatttttgtacattgattttgtatcctgagactttgctgaagttgcttatcagcttaaggagattttgggctgagacaatggggttttctagatatagaatcatgtcatctgcaaacagggacaatttgacttcctcttttcctaattgaataccctttatttccttctcctgcctaattgccctggccagaacttccaacactatgttgaatagtagtggtgagagagggtatccctgtcttgtgccagttttcaaagggaatgcttccagtttttgcccattcagtatgattttggctgtgggtttgtcatagatagctgttattattttgagatatgtcccatcaatacctaatttattgagagtttttagcatgaagggttgttgaattttgtcaaaggccttttctgcatctattgagataatcatgtggtttttgtctttggttctgtttatgtgctggattacatttattgatttgcatatattgaaccagccttgcatcccagggatgaagcccacttgatcatggtggataagctttttgatgtgctgctggattgggtttgccagtattttattgaggatttttgcatcagtgttcatcaaggatattggtctaaaattctcttttttagttgtgtctctgcccggctttggtatcaggatgatgctggcctcataaaatgagttagggaggattccctctttttctattgattggaatagtttcagaaggaatggtaccagttcctccttgtgtctgtggtagaattcagctgtgaatccatctggtcctggactctttttggttggtaagctattgattattgccacaatttgagatcctgttattggtctattcagagattcagcttcttcctggtttagtcttgggagagtgtatgtgtcgaggaatttatccatttcttctagattttctagtttatttgcgtagaggtgtttgtagtattctctgatggtagtttgtatttctgtgggatcggtggtgatatcccctttatcattttttattgcgtctatttgattcttctctctttttttctttattagtcttgctagaggtctatcaattttgttgatcctttcaaaaatccagctcctggattcattaattttttgaagggttttctgtgtctctatttccttcagttctgctctgattttagttatttcttgccttctgctagcttttgaatgtgtttgctcttgcttctttagttgttttaattgtgatgttagggtgtcaattttggatctttcctgctttctcttgtgggcatttagtgctataaatttccctctacacactgctttgaatgtgtcccagagattctggtatgttgtgtctttgttctcgttggtttcaaagaacatctttatttctgccttcatttcgttatgtacccagtagtcattcaggagcaggttgttcagtttccatgtacttgagtggttttgagtgagtttcttaatcctgagttctagtttgattgcactgtggtctgagagacagtttgttttaatttctgttcttttacatttgctgaggagagctttacttccaactatgtggtcaattttggaataggtgtagtgtggtgctgaaaaaaatgtatattctattgatttggggtggagagtcctgaggatgtctattaggtctgcttggtgcagagctgagttcaattcctgggtatccttgttaactttctgtctcattgatctgtctaatgttgacagtggggtgttaaagtctcccattattaatgtgtgggagtctaagtctctttgtaggtcactcaggacttgctttatgaatctgggtgctcctgtattgggtgcatatatatttaggatagttcactcttcttgttgaattgatccctttaccattatgtaatggccttctttgtctcttttgatctttgttggtttaaagtctgtcttatcagagactaggattgcaacccctgcctttttttgttttccatttgcttggtagatcttcctccatccttttattttgagtctatgtgtgtctctgcacgtgagatgggtctcctgtatgcagcacactaatgagtcttgactctttatccaatttgccagtctgtgtcttttaattggagcacttagtccatttacatttaaagttaatattgttatgtgtgaatttgatcctgtcattatgatgttagctgtttattttgcttgttagttgatgtagtttcttcctagtcttgatggtctttacattttggcatgattttgcagtggctggtactggttgttcctttccatgtttagtgcttccttcaggagctcttttagggcaggcctggtggtgacaaaatctctcagcatttgcttgtctgtaaagtgttttatttctccttcacttgtgaagcttagtttggctggatatgaaattctgggttgaaaattcttttctttaagaatgttgaatattggcccccactctcttctgcgttgtagagtttctgctgagagatccgctgttagtctggtgggcttccctttgtgggtaacccgacctctctctctggctgcccttaacattttttccttcatttcaactttggtgaatctgacagttatgtgtcttagagttgctcttctcaaggagtatctttgtggcatcctctgtatttcctgaatctgaatgttggcctgccttgctagattggggaagttctcctggataatatcctgcagggtgtcttccaacttggttccattctccccatcacttttaggtacaccaatcagatgcagatttggtcttttcacatagtcccatgtttcttggaggctttgttcatttctttttattcttctttctctaaacttcccttcttgcttcatttcattcatttcatcttccatcactgataccctttcttccagttgaatgcatcggttcctgaggcttctgcattcttcacgtagttctcgagccttggctttcagctccatcagctcctttaagcacttctctgtattggttattctagttatacattcgtctaaatttttttcaaagttttcaacttctttgcctttggtttgaatttcctcctgtagctcggagtggtttgattgtctgaagccttcttctctcaacttgtcaaagtcattctctgtccagctttgttccattgctggtgaggaactgcttcctttggaggaggagaggtgctctgctttttagagtttccagtttttctgctctgttttttccccatctttgtggttttatctacttttggtctttgatgatggtgatgtacagatgggtttttggtgtggatgtcctttctgtttgttagttttccttttaacagacaggaccctcagctgcaggtctgttggagtttgctagaggtccactccagaccctgtttgcctgggtatcagcagcggtgtctgcagaactgtggatttttgtgaaccgcgaatgctgctgtctgatcattcctctggaagttttgtctcagaggagtacccggccgtgtgatgtgtcagtctgcccctagtggggggtgcctcccagttaggctgctcgggggtcaggggtcagggacccacttgaggaggcagtctgcccattctcagatctccagctgtgtgctgggagaaccactgctctcttcaaagctgtcagacagggatatttaagtctgcagaggttactgctgtcttttggtttgtctgtgccctgcccccagaggtgaagcctacagaggcaggcagacctccttgagatgtggtgggctccacctagttcgagcttcccagctgctttgtttacctaagcgagcctgggcaatggtgggtgcccctcccccagcctcgctgccaccttgcagtttgatctcagactgctgtgctagcaatcagcgagcctccatgggcgtaggaccctccgagccaggtgcgggatataatctcctggtgcgccgtttcctaagcccattggaaaagtgcagtattagggtgggagtgactcgattttccaggtgccgtctgtcacccttttccttgaccaggaaagggaactccctgaccccttgtgcttcctgagtgaggcaatgcctcgccctgctttggctcacgcatggtgcactgcacccactgtcctgtgcccactgtctggcactccctagtgagatgaacctggtacctcagatggaaatgcagaaatcacccgtcttctgcgtcgctcacgctgggagctgtagaccggagctcttcctattcggccatcttggctcctcccaccctaaaaggtaaacttaagcgtgtagaaagctacgtaggaaaagagagagagaaaagaaaaaaaaaagcaaaaggacagcaagtcattctaagtactctggaaaaaaactgaaagtggggttagaaaaaaaataggaagaaggtctcagtagtcccaggtactcaaggaggccaagatgggaagaccacccgggtgagactggggagatgaaggctgcagtggatcacagttgcatccctctgctggacctgaacggtactgccacaggtgagagccatctagtgaaacttagacatggcaagctggcagctaagtccaagggtcatgggtggcatcggtctcaaaattaataaacaaaaataccaacagtaaaaaaaaattaacaataacaaagaaataacaaacaatattaaggaccaaaagtaaataagtgggagcgaaaaaaaaggtaattaatatcacaattaagatcttctctctctgtctctctccttttgtcacatccaggctgaagtgtgacaaatgaaaaataacctaaaaattcaactgcaatgtgcatgaaagaccataggaaaataaagaaaagaacaaacaagaaaaacaacagcaagtcactctaagtactgtggaacaaattgaaagtggggttagtctgtaatattgtttgttattctttctttattattgttaaatatttactgttgggtttttaaatttattttgagactgatatcagcctcaaggcttggacttagcttccagcttaccatctttaaggctgaccagatgactctcgctatgccatgtctaaggttgactggatggctcttgctggaggtagtaccattcaagtccagcagagggatgccatcgtaattcactgtggcctcatctctctggtcccacccaggtgatcttcccatctcagcctaccgagtacctgggactactcggaccttcttcctctgttttttttttttttttcctaaacacacttccagtttgtttccacaatacttagagtgacttgttgttgtttatcttctttgttcttttgtctctctattctcctatgctccttcctgtatgctgaagctaatctttgttttttttttttttttttggtcacactctagactgggtgtgacaaagagacagagagagagagtgtgtgtgtgtgagagagagaaaataaatcttaattgtggtactaattaccttttacctttgttcactcccatttatttatttattggtctttaatatggtttgttattttttgttatcgttatatatttactgtaggtttttaaatatattttgagacagatgtcggttgcaagcattggacttagctgccagcttttcatgtccaaggtcgaccagatggctctggccttgccatgtctaaggtcatccatatgactcttgccagtggcagtaccgttccggtccagcaggaagatacgatcatgattcactgtggcccttgacctccctggtcttgcccaggtggtctacccatctctgcctcttgaatatctggggctactcgaaccttcttcccctgtttttttctaacctcactttcagtttctttccacagtacatagagtgatttgctgttgtttttcttctttgttcttttctcccagtattttcctacactccttcctgcatgccgaggttgacgttttgttgtgtgactacctggataagactggaaagatcaaggctgcagtgaatcaggattgcatccctctgctggagctgaatgggactgctgctgacaagagccatatggttaaccttagacagcaaaacgtgagccatctggaggaccttagacatggcaaggcaagagccatctggtcgaccatagacatagcaatctggtggctaagtccaatgcttacagccaacagctgtctcaaaataaataaacaaaaaacccaacagtaaatatttaacaataacaaagaaataataacaaacaatattaaagaaaataaataaggaggagtgaaaaaggtagagtacaataaatatcacaatgaagattttctcctctctctttctctccatttgtgacacccaggctggagtgtgacaaaaaaaaaaaaagaaagaaagaaaagaaaataggttaacttcagcttacaggaagaagtgtaggaaaatagagaaaagaacaaagaagaaaaacaatagcaagtcactataagtactgtggaaataaactgaaagtgggttgagaaaaaaacaaacaaacaaacaaaaacagaaaaagaagttctgagtagtcccgggtacttgggaggctgagatgagaagaacacgcaggtgtgaccagggagattgaggctgcagtgaatcacgatcacatccttctgctggaactgaacagtactgctaccagtgagagccatgtggtgaatcttcgacatggtaagggaagagccatctggttgacctaatacatgtcagggtgagaaccatctggtcaaccttagacatggcaagctggcagctaaatccaatgctcactgccaatgtctctcaaaataaataaacaaaaaaagtaaatatttaacaataacaaagaaatgataacaatattaaacaccaataaataaatgagagttaacaaaggtaattaatatcacaattaagatctttctctctctctcctctgtgtgtgtgtctctcccctttgtcacacccaggctagagtgtgataaaaaaatatttaaaaggtcaacttcactgaggaggaaggagcataggaaaacacagaaaagagcaaagaagaaaaacaacagcaggtcactgtaagtactttggaaacaaactatcagtagggttagataaaaaacagaggaagaaggttgtttcaggtacacgggaggccaagatggatagatcacccaggtgagactgggaacattgaggtcacagtgaatcacgatcgcatccctctgctgcacataaactgtactgtcaccagcgagagccatctgctcgaccttatacatagcaaggcaagagatacctagttgaccttagacatggcaagctggcagctaagtccaatgcttgtggctgagatctgtcaaaaaataaatacacaaaaaacaacagtaaatatttaacaataaagaaatagtaacatacaatattattgaccaataaataagtggaagtgaacaataataaaaggtaattaatatcacaattaagatctcttttctctttctccctgtatgtcacacccaggctacagtgtgataaaaaaatctaaaagtcaacctcagtgtgcaggaaggagtgtaggaaaatactgagagaaaagaacaaagaagaaaaacaacagcaaatcactctatgtactgtggaaagaaactgaaaatggggttggaaaaaacagaggaagaaggtccgagtagtcccaggtattcaaggggccgagatgggttgaccacctgggcaagaccggggaagtgaaggccagagtgaatcaccattgtatcctcctgctggacctgaacggtactgccactggtgaaaatcatatggacgatcttagacatggcaaggcgagagccatctggtcaaccttagacatggaaagctggaggctaagtccaacgcttgcgactgacatctgtctcaaaataaatttaaaaacctacagtaaatacataacaacaaaaaaaattaaagaccaataaataaataaatgggagtgaacaaaggtaaaaggtaattagtgtcaaaattaacatttattttcacacacacacacacacacacacacacactctctgtctctttgtcacacccagtctggagtgtgaccaaaaaaaacaaaccaaaaggtcagcttcagcgtacaggaaggagcataggagaatagaaagaaaaaagaacaaagaagataaacaacaacaagtcactcttaagtattgtggaaacaaactggaagtgtgtttaggaaaaaaacagaggaagaaggtccgagtagtcccaggtactggtaggctgagatgggaagatcacctgggtggaaccagggagatcaaggacgcagagattcacaatcgcatccctctgctggacctgaatggtactacctccagcgacagccatccagtcgaccttagatatggcaaagcgagagtcatctggtcagccttaaagatggtaagctggaagctaagtccgaggctcgaggccgatatcagtctcaaaataaataaacaaaaaaacccaacagtaaatatttaacaataacaaagaataacaaccaatattacagaccaataaagtgggagtgaacaatggtataaggtaattaatatcacaattgagatcttctcctttcctctctcttttttctctctctctctctcttttttccatttgtcacaccgaggctggagtgtgacaaaaaataaaatctaaaacttcaatttcaatgtccaggaaggagctaaggaaaatagagaaaagaacaaagaagagaaacaacaacaaatcactctaagtactatggaaacaatctgaaagtggggttagagaacaaacagaagaagaaaatgcgagtactcccacgtactactcggaaggccaagatgggtagaccacctgggcaagaccggggagatggaggccacagtgaatcacgattgcatccctctgctggacctgtgtggtactaccgccggcaagagccacctggtcgactttagacaatgcaagctgttggctaagtccaacacttgcgaccaacatctgtctcaaaataaatttaaacaccaacagtgaatatataacaataacaaaaaatagcaaacagtatgaaagaccaataaataaatgagtgaacaaaggtaaaagataattaatattacaattaagaccttctccccttactctcattttttctctctctctctttctctccctgtttgtcacactcaggctcgagtgtgacaaaaaaataaaccaaaaggtcaacttcagcatgcaggatggagcataaaagaatagtttgcgggttagggctcagaaatggaaggaaggctgggaaatgcaggaccacaagaaatgaaaagctgtgttcattctcccctggtgaccctatgctcagcagggactagcagaaactgagggttttgtgatttgaaagggaggatgagtccagccacatacccctggctgttacctaatgtgtgggcttcactaacattagatagtaatttggggaaaagagtagaaatagatcatttgtttgtctccatgtaattttttttttttaagacaaagtctcactctgtcacccaggcaggagtacaatagtgcaatcttggcacactgcaacctctgcctctggggctcaagcaattatcctgcctcagcctcccaagtagctggaactacaggcgaatgccaccgtgcccagctaatttttatatttttgtagagacggtgtctcaccatgttccccaggtgattcaccctcttctgcctcccaaagtgagctcaggtgattcaccctcttctgcctcccaaagtgctgagccacaatgcccagacttcatataagagttttcagtgtgagttttttttttcttctactggtcagcatagaaccttttttcaacatgtgagtttcttcctaattactggattgtggcaccaaaaaaaaggcatatttgaagttctaaatgtcatattatacattgtgaagtgacttctcaggactgatcttatctaagaaagaagtctggagaaagagagaaaagaaagagacatgaagaatggcaatatcaacccaggtgatagtcattcttggttgattatcttcttaatgcagtgctgtgtttagcactgactaacctttgattctgcagtctcctacctgacacattggcttgcactcacccaggaccttacctcagtctcctcccatctttatttaactgtcatttcatgaaatggcacttgtgaaaaggctctgtatagattgtcttgggcaaagcttcactccagacctagattgaggacacggagtgggctctgtgggttcagtagagttgagctgcagggattgtttaggggccacatctggaggtaccatctgctttctctgaaccaaaattaaacaaaatgcacatgtaatggtgcattaatatccaggaagacctggggaatcttagacaacaaatattgataccaaaaaactggctaagtttgacttcataatgcatttgaagctaacccaagtgaattagtgctgtttgagcctcaaagtagaatccataaaactctacaattacaaatataagccaattccatctttaaattaaatttgttgtaggttgtgccttgtctgaaaaagtaactcttctgttccagaaactgaccactgccaaaaccatgcataaggtgtgaaataattactaactcataggctgaaattgtggaaagaatataatatcaagaacataagccattccataactgatcataatttaatataatgtaattctcagtggtcctcattgttgctttgtgatgtataaagatatggaatatgttttatgaaaagttcttcaatacattttgactattaatccgctaactcttattttctctacaagagtcaggaatgactccaagattagtagatatatttctccaataccttcatgcatataaagtgcatagaatgtagctgattgaattatcttattcttttcaaaaatattaaatgtaggttttttgttgtgttattttacctgctagggcatattatatacttaagaaagatcataattggatggcgacagaaaacatctggtctttgtcaattatgataagactatttgcttcattaaatcagggaaggaggattcaaggaaaggtaacttgatgaccttaatgttttcacattagaaaaaaaaaagcatggatttcaattgttttcagaattgaatagtttgtgacatttcttcttggtttaaaaatattctaaagccgcagcctggccaacatagtgaaagcccatctctactaaaaatgcaaaaattagccgggcatggtggcatgtgcctgtagtcccagctacttgggaggctgaggcaggagaatcacttgaacctaagaggcggaggttgtggtgagccaagatcgtgccactgcattctagcttgggcaacagagggagactccgtctcaaagaaaaaaaaaattctaaacccttgccaggcttaatattcaactatttcaattatttaagtaaataagtatctgtgcctccagttttcctctccaaaatggatttgttttaatatatttaatgattctaacattgaaataactttatttgatgttttcattcactaaaaatacaattttccctgtaataaatggttagatttaatttggttagatttaaatgagatcgctacaatcaaaactcttttaaagtacaaatatattttataactgacaaatatgcaaaattaaaaataacaaatttgtgacatattaaagtgtatctgtgtctgtaagattgagaaacatagtggataagcacattgtctacacctgaaactttctttttacaatgaggtgactttagaaatgtcattcagccttcttttgtttaatatctccttacctgtaaaaagggaacaataaagcacattgtagatgtatgataaaaatacatgtaaaacctgttatagtattctagagtagtgttatagtatagtgggaatatatatgtttttctctttagaacaaaagtattgtgaaataaaagtttcaataaaatatttctgagttggatacaatgggaagtacacagtagaatgtttctattttctccataaaacagacctcatctgtccatgaaagatctcctcacgtggaaatgaaattatcagttacttgaaaatatcagattgtctccagtaatatagcagtaggaatgatcttatctcagaccatagttaaatagttggattttttttcttccttgacatcagattttctttaattaccagatgcacattgtgatacacagatttgactctcaagcacctatggccaactccttggtactctccaaaaaggtcccttagacaatgactgatttggagttgaaatattttttcagtaatattagatagaaagttgttttctgtattcacagagtggccacagcatgtgcattggcaccatctgcctcttgagtatctcccaggtcatcaccatcagcccccaaaacctcaggtgaacgtagcttaaactacatgcttccaaatatatttgaatctctaatatccaaattatgtgctgaattctgaataggcttgtaaatgtcattttttcctgtgtatgttactggtaagtggaacaccataaagaacacaaagattattttaaacactgttctggagtagttaataacagaattccacatttatgacatgtcatgtttttatcattttttagtgttttgtgtttggaaattataacctgggccaacagctccatgacctttattctgttcaacacaagtggtgggtccaacatattcataggtccaacaccactcctaaattctcacatgagtccagagtcacccaaagcatctttgtcctaaaggagcacctttgtatcattttacactctctcctacatcttttcagtatatatggttattttgtataattcaaattgttggcttatgaacaactctaaactgattaccgcttgtttttttctatagtcaggcccattgttctcctaagccatgaccccaggataaacagtataacctcttcatgctgtggaaggaatatacagtttcctaagataatcagatagatctacattttatgtggaattattttttaaatgtgcagacatgtattcattattttatgcagaggttaaattcccacaaagagcagtcacatatcagagaacctgtgaatcacagactgagtccctgccctcatagaatttattgtatggtagcaatgacagttacagactaaatgttttgaatagttttttgataattttctatttactaaatgttataataaagaaatgtagaggccaaaaatttatcttaaaattgggcctctaataatttagacaatggaaagcttatatggttatgtagctttaaactaattaagttaaaatgtcatagatggctcataggtacatcaagatggtagaatggaaggcttcgccaaccatcccccctgcaaggacaccaatttaacaatgacctacatttaaaaagcaccttcgtaagaaccaaaagtcaggtgagcactcatggtacctggttttaacttcatattgctgaaagaggcactgaacgggtaggaataacagtcttgaatcttttacactatttttcccacatcccccaacaatggtggcatggtgcagaaagggagagttcagcaattgtgaggcattgaattcagtgctttcctgttataacggaaagaaaaagcaaaccaaactcggctaacacttgctgatggaggaattatttaaaccatatagttaaatacagttgctggtgatagtaagtacacagaaaattaaataatattataacaccgtaactgtggtgtgtgaactacttttatgcaaggtagaaagactaaacaataaaccaatcaaaaataacaactgcaacaacttttcaagacatagacagtaaaattacatataaatagaaacaacaaaaactgagggaagagatttaaagcatacagtttttattattctttttgcttctttgtttattcaaacagtgttaagttgttattagattaaaataatagattacaagatagcatttgcaagcttcatggtaacctcaaaccaaaaaacatacaagaatacacaaaaaataaaaagcacaaaactaagtcacatcaccagagaaaactaccttcaataaaaggaagacaaaaagcaaagaaagataaaagagaagacctccttcactaaaaggaagacaaaaagcaaagaaagataaaaaagaccccaaagcaaccataaaacaaataaaatggcagaagtaaggttttgcttatcaataataacattgaatgtaaatggactaaactcgccaatcaagacagagtggatgaatgtatataaaaacaagacatattgatcctttgcctgtaagaaattcacctcatctataaagacatacatagactaaaaattttagaaatggaaaaagatattcaatgtcaattaaaaaaatgcagtagtagctatacttacatcagaaaaatagatttttagacaaaatttataaggaaagacaaagagggctgggtgcggtggctcacacctgtaatcccagcactttgggaggccaaagtgtgtgggtcacgaggtcaggagttcgagaccaacctggccaatatggtgaaatcccatctctactaaagctacaaaaattatttggtcgtggtggcatgcacctgtagtccgagctgcttgggaggctgaggcaggagacttgcttgaacctgggaggtggaggttgcagtgagctgagattatgccactgcacttcaagagcaagactccatctcaaaaaaaaaaaaaaaaaaaaaaaaagacagagaggttactatgtaatcataaaggggtaaatttaacaagagggtataacaattttaaatataaatacaaccaactcttgagcactgaaatatataaagcaaatattattagagcctgagagagatagactctaatacaataataggtggagactccaaaaacccactttcagcattgaatagatgttacagatattccagacacattatcaacaaagaaacattggacttaatctgttgcactatagaccaaatgtacctagtaaatatttacaggacattttatctaatggttgcagaatgcattcttttctttagcacatggattattttcaaggatagactatatgttaggtcacaaaaaagtcctaaaacattcaaaaactagaaataatatcaaacatcttatttgtccacaatggaataaaattataaattaataagaagaggaattataaaaactatacaaatacacaaaaataaacaatatgcttctgagtgattattgggtccatgaagaaattaagaagaaaattaaaaatgttcttgaaacaaatgataataaaagcactgtgtatcaaaatctatgggatacacaaaagcagtactaacaggaatgtttataggtataagtgactacatcccaaaaatgggaacattttcaaataaacaacctaataatgtatcttaaagaactagaggccgggcgcggtggctcacgcctgtaatcccagcactttgggaggccgaggcgggcgaatcacgaggtcaggagatcgagaccatcccggctaaaacggtgaaaccccgtctctactaaaaatacaaaaaattagccgggcgtagtggcgggcgcctgtagtcccagctacttgggaggctgaggcaggagaatggcatgaacccaggaggcggagcttgcagtgagccgagatcccgccactgcactccagcctgggcgacagagcgagactccgcctcaaaaaaaaaaaaaaaaaaaaaaaagaactagaaaagcaagaacaaaccaaacccacagttattagaagaaaaaaatcataaagattagagcagaaatcaatgaaaaaatttggcttttttgaaaagttaaaaattgacaaaccttcagcagactaaacaaaattttaaaatccaaatttaaaacaatttaacaaacaaaaaaataaactaagaaacaagagggcaagttagtgaggcctacaggctccaggacaatgtaagagatctcagaagcctcccatgctttcttgtttgcctccgctgttctgaggtatccagttaactcacaagactccatcatcccagcctggaaaatgactctggttccacttccaaaaaagaaccccaaagctatgacagggatggccttcagatcagtgataggatgctctgccatgttctatactaagctgagtgctcagtcccacaaaccgccaggccaatttttgctctgaaaaacctccagaggataatagagaaatttctaaggatctgagagtagagtgggtaactgatagacagcaaggtcaactcacctttttaagcctttgaaatttagaggccactcaggtcaattacttcaatttacagagaaaaaagtttgaggttttcactactgtattcccctccatactgggtgtagggggattcctcccggttttaattacagagagcagtgaatgcagaagccaagtttttgtcctctgaaagctttcctggggatggccacagcccaggcagatccatgggaaccttgaagttcccaagtcatcagttataggtcctggacatgttaccaggagactgggtgcccctaccccatggcaaagctgccgccatcctctgtcttctttcttctcgtcactccatcagtgttaactcttcctttaacctgagaagtctgtgtgtgtgtgtgtgtctgtgtgtgcacacgtgcatgcaaaactgtgcaggtttaatgatgcagacatgagtttgctgcatatgagaaaattggcagaaattctcaggatctcagggactctcattcctaaagcaaaccccattataaggatgaaccttggcctatgaggtcagaatgctcttttatcctctggactctgccaactttatgttctctgggccattctctgcttctctccagacttcaatttcccagttatccagtgagatgttagatgtcaaagtgcttaaaccacagctcagcctgcacatggtgcaagttccctaccaactaggatgggtgtagcagagctgtgatgagggtgtgcccagatcttcctcacttgggcagaaatagatgggttctgcactgggcagctggaccttctgtccaaaaagtcatgcacacaggatccttcaaggcccacagacaatgtgtgcatgtgggacccacctttatcccccagcagctcccactggagcatacccaatatgtcccctgtcctctgcatctagaaagtggtgacatccacacttaacacacggactgataagccctttgtggtggagtagtcctacaaaaagaatctgagatgctattactgtacaaggaattatggaggtgggccatatagaagcactagaacttcagaattaaatctccccactcctgcctccaccactatgcagataagaaaatgtcttaagaaagagacatgtcttaccgaagattaccagggattccatgtcaaagctagcactttggttaggattacatttgcctacaagtagaaggatacccaatataatagtagtgcagacaaaagacagaatgctttctttctgataaataagaatcttagagctggacagtccatgctgactctggactgtgcaccaaggcagtcaaaaataatctatctttttgctacaactttttttctaacttttaagttcaggggtacatgtgcaggatgtgcagctttgttacataggtaaatatgtgtcataaagattggttgtatacattgttttatcacccaggtattaagcctactatccattagttattttttctgcttctctccctcctcccactctccacctcatgatatgccccagtgcatgttgttccttctgtgtgttctcatcatctagctcccacttgtaagtgagaaaatgtggtatttggtttccttttcctgcattagtttgctaaagataatggcctccaacttcttccatgtctaaaaaggacatgatcttggtttttttttttaatggctgcatagtattctgtggtgtatatgtactacattttctgcatccagtctatcattgatgaacacgtgggttgatttaatgtatttgctattgtgaataggtctgcaatgaatgtgtgtgtgcatgtgtctttataatagaatgactttataatagaatgacatattcatttgggtatatactcagtgatgaaattgctgggttgaattttatttctgtctttaggtctttgaggaatcatcacactgtcttccacaatggttgaactcatttacactcccaccaacagggtaaaaacgttcctttttctccaaagttttaccagcatatgttattttttgactttttaataatagccattttgactggtataaaacaatatctcattgtggtttggatttgcatttctctaatgatcagtgatgttgaggttttttcatatgcttttttagctgcatgtatgtcttcttttgagaagtgtctctttttgtcttttgctcactttttaatggggttgtttacttttttcttgtaaatttaagttcttacagatgctggaaattaaatctttgtcagatgcatagtttgcaaaaattttctcccattctgtacgtggtctgcttactatgctgatagtttttgttttttcttttcttttctttttttctttcctttttttttttttttgctgtgcagaagctctttagtttacttagatcccattcatcaatatttcctttgttttaattgcttttggcatcttcatcataaaacatttgcccatgtgtatgtcctgaattgtattgcctaggttatcttccaaagtttttatagtttggggttttacattttagtctttaaaccatcttgagttgattattgtatatgctgtaaggaaggagttcagtttctttttttaaattttactttaagttacaggatacaagtgcagaatgtgcaggtttgttacataggtatacatatgccatggtggtttgctgcacctatcaacccattatctaggttttaagccatgcatgcattagctttttgtccttatgctctccctctcctcacctcccatcctccgactagccctagtgtatgttgttcccctccctgtgtccatgtgttatcattgttcaactcccacttacaagtgaggacacgtggtgtttggttttctgatcttatgttagtttgctgaagatgatggaggaagagagtccgtttcaattttctgcctatggctagccagttatcccagcaccatttattcaatggggtgtccttttcccattgcttgtttttgtcagttttgccaaaaatcagatagttgtagccatgtggtcttatttctgggttctctattctgttttattggtctgtgtgtctcttcttgtaccagtaccatgcctttttggttactatagccccgtagcatagtttgaagttgggtagcatgatatcttcagctttgttatttttgcttaggattgtcttgagtattcaggctcttgtttgtttcaatatataatttttttaattatactttaagttcttgggtacgtgtgcagaacgtgcagttttgttacataggtatatatgtgccatgctggctcactgcacctagcaaccagtcacttacattaggtatatctcctgatgttatcccttccctagcccccgacagcctgacaggccccagtgtgtgatgttcttctcattatgtccatgtattctcattgttcaactcccacttatgagtgagaacatgagctgtttgattttctattcttgtgatagtttgctgagaatgatggtttccagcttcatccacgtctctgcaaaagaaatgaactcatccttttttatggctgcatagtatttcatggtgtatatgtgccacattttctttacctagtctattattgatggacatttgggttgtttctgagtctttgctattctgaatagtgctgcagtatatgtgtgcatgtgtctctatagtaggatgatttataatcctttggttatatacccagtaatgggattcctgggtcaaatggtatttctagttctagatccttggggaattgccacactgtcttccacaatggttgaactaatttacactcccaccaacagtgtaaaagcatccctatttctccacatcctctccagcatctgttgtttcctgactttttaatgatcaccattctaactggcatgagatggtatctcattgtggttttcatttgcatttctctaatgaccagtgatgatgggcattttttcatacgtctgttggctgcataaatgtcttcttttgagaagtgtctgttcatatcctttgcccactttttgatggttttttttttcttataaatttgtttaagttctttgtagattctggatattagccctttgtcagatagatagatggcaaaaattttctccctttctgtgggtggccttttcaccctgatgatagtttcttttgctgtgctgaagctctttagtttaattagatctcatttgtcaattttggcttttgttgccattgcttttggtgtattaaacatggagtttttgcccatgcctatgtcctgaatggtattgcccaggttttcttctaggatttttatggtcctaggttttatgtttaagtctttgatccatcttgagttgatttttgtataagatataaggaaggggtccagtttcagttttctgcatatggctagccagttttcccaacaccatttattaaatagggaatcttttcctcattgcttgcttttgtcaggtttgtcaaagaccagatgattgtaaatgtgtggcattatttctgaggcctctgttctgttccattggtctatatatctgttttggtaccagtaccatgctgttttggttactgtagacttgtagtatggtttgaagtcagatagcatgatgcctccaggtttgttcttcttgcccaggagtgtcttggctatgtgggatctttttttggttccatatgaagtttaaagtagctgtttacaattctgtgaagaaagtcagtggtagcttgatagggatagcgttgaatctataaattactttgggcagtatggcagttttcaagatattgactctctctatccataagcatggaatatttttgcatttatttatgtcctctctaatttccttgagcagtggtttgtagttctccttgaagaggtccttcacatgccttgtaagttgtattcctaggtattttattatctttgtaacaattgtgaatgggagttcactcatgatttggctgtcagtttgtctgttattggtatatagaaatgcttgtgatttttgcatattgattttgtatcctgaaactttgctgaagttgtttatcagcttacagagattttgggcagagacaatggggttttctaaatagaaaatcatgtcatctgcaaacagagagaatttgacttcctctcttcctatttgaatatctttatttgtttctcttacctgattgccctggccagaacttccaacactatgttgaatagtagtggtgagagagggtatacttgtcttgtgccagttttcaaagggaatgcttccagtttttgtccattcagtatgatattggctgtgggttagtcataaacagctcttattattttgagatacgttccatcaatacctaatttattgagagtttttatcttgaaggggtgttgaattttgtcaaaggccttttctgcatctattgagataatcatgtggtttttgtctttggttctgtttatatgatggattacgtttattgatttgtgtatgttgaaccagccttacatcccagggatgaagcccacttgatcatggtggataagctttttgatgtgctgctggattgggtttgccagtattttattgaggatttttgcattgatgttcacctgggatattggtctaaaattctctttttttgttgtgtctctaccaggctttggtgtcaggatgatgctggcctcataaaatgagttagggaggattccttctttctctattgattggaatagtttcagaaggaatggtaccagctccgccttgtacctctggtagaattcggctgtgaatccgtctggtcctggactttttttggttggtaggcgattaattattgcctcaatttcagagcctgttattggtctattcagggattcaacttcttcctggtttagtcttgggagagagtatgtgtccaggaatttatccatttcttctaaattttctagtttatttgcatagaggcatttatagtattctctgatggtagtttgtatttctctgggatcagtggtgttatgccctttatcattttttattgcatctatttgattcttctctcttttcttctttattagttttgctagctgtctatcaattttgttgatcttttcaaaaaaccagctcctggattcactgattttttgaagggttttttgtgtctctatctcctttggttcttcccttatcttagttatttcttgccttctgctaggttttgaacgtgtttgctcttgcttctttagttcttttaattgtgatgttagggtgtcaattttagatcgtccctgctttctcttgtgggcatttagtgctataaatttccctctacaaactgctttaaatgtgtcccagagattctggtatgttgtgtctttgttctcattggtttcaaagaacatctttatttctgccttcatttcactgtgtacccagtagtcattcaggagcaggttgttcagtttccatgtagttgagcagttttgagtgagtttcttaatcctgagttctagtttgattgcactgtggtctgagagacagtttgttataatttctgttcttttgcatttgctgaggagtgctttacttccaaatatgtggtcaattttggaataagtgtgatgtggtgctgagaagaatgtatattctgttgatttggggtggagagtcctgaggatgtccattaggtctgcttggtgcagagctgagttcaattactggatatccttgttaacttactgcctcattgatctgtctaatgttgacagtggggtgttaaagtctcccattattattgtgtgggagtctaagtctctttgtagatctctaagcacttgctttatgaatctgggtgctcctgtattgggtgcatatatatttaagatagttagctcttcttgctgaattgatccctttaccattatgtaatggccttctttgtctcttttgatctttgttggtttacagtctattttatcagagactagaattgtgacccttgcctttttttgtttcccatttgcttggtagatcttcctccatccctttattttgagcctatgtgtgtctctgcacatgagatgggtttcctgaatacagcacactgatgggtcttgtctctttatccaatttgccagtctgtgtcttttaattggagcatttagcccatttacgtttaaggttaatattgttgtgtgggaatttgatcctgtcattatgatgttagctggttatgttgctcgttagttgaggcagtttcttcctagcatcaatggtctttacaatttgtcatgtttttacagtggctggtaccggttgttcctttccatgtctagtgcttccttcagcagctcttgtagcgcaggcctggtggtgacaaaatctctcagcatttgcttgtctgtaaaggattttatttctccttcacttatgaagcttagtttggctggatacgaaattctgggttgaaaattcatttctttaagaatgttgaatattggtcccctctctcttctggcttctagagtatctgctgagagatccgctgttagtctgatgggtttccctttgtgggtaacccgacctttctctctggctgcccttaacattttttccttcattttaactttgaggaatctgacaaatatgtgtcttggagttgctcttctcgaggagtatctttgtggcattctctgtatttcctgaatttgaatgttggcctgccttgctagattggggaagttctcctggataataccctgcagagtgttttccaacttggttccattctccccatcactttcaggtacaccaatcaggtgtagatttggtcttttcatatagtcccatatttcttggaggtttgttcatttcttttcactcttttttctctgaacttctcttctcacttcatttcattcatttgatcttcaatcactgataccttcttccagttgatcgaatcagctactgaagcttgtgcattcgtcacgtagttcttgtgccatggttttcagctccatcaggtcatttaaggacttctctgcactagttattctagttagccattcatctaatcttttttcaaggtttttagcttctttgcattgggttcgaacttcctcctttagctcggagaagtttgatcatctgaagccttcttctctcaactcatcaaagtcattctctgtccagctttgttctgttgctggagctgcattcctttggagggggagaggtgctctgatttttagaattttcaacttttctgttctgttttttccccatctttgtggttttatctacctttggtctttcatgatggtgacttacagatggggttttggtgtggatgtcctttctgtttgttagttttccttctaacagttaggaccctcagctgcaggtctgttggagtttgctggaggtccactccagaccctgttttcctggtatcagcagcagaggctgcagaactgcgaatattgttgaacagcaaaagttcctgcctgatccttcctctggaagcttcatctcagaggggtacccgaccatgtgaggtatcagtttgccactatgggggggtgcttcccagttaggctactcaggggtcagggacccacttgaggaggaagtctgtccgttctcagatctcaaactctgtgctgggagaaccagtactctcttcaaagctgtcagacaggggcatttaagtctgcagaggtttctgctgccttttgtttggctatgccctgcccccagaggtggagtctacggaggcaggcaggcctctttgagcagcagtgggctccacccagtttgagcttcctggccacttgtttacatactcaagcctcagcaatggcgggcgcccctcccctagcctcactgtggccttgttgtttgatctcagactgctgtgctagcaatgagtgaggctctgtgggcgtgggaccctctgaaccaggcacgggatatattctcctggtgtgccatttgctaagactgttggaaaagtgcagtattagggtgggagtgacccgattttccaggtgccgtctgtcaccccttccctttgctaggaaagggaattccctgaccccttgtgcttcccaggtgaggtgatgccttgccctgcttcagctcacactcggtgggctgcacccactgtcctgcctccactgtctgacaagccccagtgagatgaacctggtacctcagttggaaatggagaaatcacccatcttctgcgtcactcacactgggagctgtagactgcagctgttcctattcggccatcttggaactgcctcccattttgatctttacccacacagataattgtgacgtatttctaggactctcacctaaataaagttatccttttacctgggctctcctctcaggggttattgcaaggtattgctggacgtaaagcctaggtgatgtgactcttctagactgcttagcctttgctcaatacaaaattgtaatgtttcaatggatccaagacctaaatgatgtgactatcatctcttgcctgagccctgaatacattgtgttttgtgacactgtgactctcttgcatgggccctgccaacagaaggcattatgacatatctctggctgcatcaattatttgatgtgactctgctgttttacctggacattgcccatagaagagattgtgacatatctctgggccaaatagctaggtgttggtgactctcctcttttgcctgtgccaggctcccagaaggaataatgaattatcactaggcccagcacaaatgcaatgtcattcttctgcctgattattgtccacaagggccactgtgacatatctctgggcccatgacctaggtgatgtgattctcattttctttctgggacttgtccacagtgaaaattgtgacatatttcttgctgtagcacctacattatattactctctactcttgcctgagccctgcctactggtgtgattgtgacagataagtgggcactgaccttatgttatgtgattcttatctttttttctagctgtatttaccagggacattgttacatatttcttgttccctcaccaaggtgatgtgacacctctgcctaagcctttctctcaggaagtattgtggcaaattgttgtacctggcacctaagtaatgtgacccttctctacttcttgggctctgctgaaggaggcattgtgatgtatccctggacacagggcctaagggatgttactctcctctcctgcctgggcccggcatacattgtgtgttgtaatatatggctgcacccaacaagtacgtgatgcaactctactctacggtccctgaagacaggggtattatatgatactgtttgttcatcacctaggagatatgacacatttttgttgcctgggacctgccaaataagaagattgtgacatatcacttgatccatcatctaggtgatatgagtctctctctctctctttttttttttttgcctggtccccacatgttttgggtattgtgacatatcgctgggcccaatacctagaaatggaacgctcctggctggggcctgtccacagtggacctggtgacatatttctgcatttatcacctaagcaatgtggctctcttcttctgcctgcaccctgcctacagggaagattgtgacatgttgctggcctcagcaaacagatgataagtctctcctaattgagtcttgcccacagaaagcattttgacacatcgctgggcccattaacaaggtgatgtggttctgcagtctacatcctgcatccagctttcaggaggggattgtgattgtaacatattcctggctaagtacccaggtgatattattcctctgcctggtcccttctgtcagggaagattgtgacatattcctggaccagaacataggcgatgcgactctcctgtttgctccctacccacaggtagggacatatatcttggtccagctaacagttgcaatgatgactctaataccacacaccagccaacagaaaatatactgtctgttttagctgaggttagagacacgggtaaaatcccatgtctcctctttgtatgaaggttatagaaaattaccactttctcacacattgtataaagccctagtgtggaacaaaatgtcaccacggaacccagcattcaaatgagattgtgtttctcatattctcaccctaccatccattaggattttcacccttacacgtggacagagcccacaggtgaggtcctgaatcacacaggttgacacagtccacagctggaattgtttctctcatttgctaagttgggatggtgactcatttccaaacctagttcacttctgtttggactgagccaattgaagagaagttgactctgagacaagcggttagggtaaaaattataaccatgggtccataccagaagggaggtctcaaagcatattgaggctctcatgcataaagccctcaggtgctacaaagtgtttcctgacaaggcacagcacaggtgagattttgacactggtatgcacatcatactgccacatgaacacagccaacttttgaggttctgaatgtcacatttggaggcagtcgaaacttgaaaaagtgactcttatatgtggatccagtccacaggtgggctggtgactctccgtccaagattcagcacacctgtgaggctgtgactctactaaggaggcatagtgcacagaagaaagcgaggttcccacgcacagacctagtccaccattaagattgtgactcatgtatttagacccaacatagaggagatgttgactcccatacttagaattgggtcatgtgcaagaactttaactttatccctgtatctttctgcatgtgagactgtgtgacatatgcctctgtccagcaactgagtgatttaacacttctgccttggcccaacccacagatggaattttgacatattgctaaacccagcaccttcatcatgggactctattccactgccttggcactgcccatagacagcattgtgacatatcactgtcactaggccttatattcagttaatgtcagtctcctcttctgttttgtcactgtgcacagaaggcattgtgacgttgggccccacacccaagttatgtgattctcctacctgtaccctgcccacacggcccattgtgatatgttgcttggtccagaacccaggtgatgtaactctcttgccttggcccttcctacaggaggcattatgacatctctgcacccattagccaggtgatatgactcacttctgcctgatcgctgctcacagggaatattgtgactcatcactgggcccagcattgagttgatgtgactcttctattctttttaggttctgcctgcaggagagattgtgatgtgtctctggactcaatagtaaggtgatgctacacttttgccttggtcctgacctcagaaagctttgtgacatattactgggctcagcaacaacatgatatgagtctcttgcttggaccctgcccacagggggcattgtggcatatctctaagttcatgaactatttgatgtgactcttcttgcttatgtgggctttacaattagaagagattgtgacatgtctctgattccagcacctaggtgttgtgactctcctcgtttgcctgtgctatgctcactggatgtaaagtaaatgatcactaggcacgacacacaggcaatgtgattctactgcctggtcattgcccacaggggtcactgcaacatatctctgggcccattacctagatggtgtaattctccttatttttctgcttctgtccccagtagggattgtgacatattccttcacccaacatttatgttatgtgattctcctctcatgtctggactctgaccacttgtaattttgacataaggctgggctcatctgtctaggttatgtgacaggttatgtgactctcttcttttttcctaagccctacctacagggagctttggtacatagctctgggcccctcaccgaaatgatgtaatcctcattcttgggcccttcactcagtaggtattgtgatatattgatggactcagcacctaggtgaggtaactctcttctacttcttgggctctgaccaaggaggtattgtgatgtatcgctgagcccagcacataggtaatgttactctttttgtttatcacttggatgatgtgacacattttatttttctgcctgggccctgctaaaaagggggattacaacatatcatttggctcagcacctatgtgatgtgactcctttcttctaggccccacatatttggtgtattgtgaaataacgctgggtcccacacctagaaaataagaggctcctgcctgggccctgcccacagggggccttgtgacatatatccacatacactacgtaggaaatgtgactcttcttttctgcctggaccctcctaacagaaaagattatgacgtatcactggaccctgcaagaaggtggtgagtctcttttgactgggtcttgaatacatagatcactgtgacatattgctgagcccttagagaagactgtgacatacatctggccccaaacccaggtaatgttactctcctgcttactcctgatctggaggagtgattgtcacatatatcttggcccagctcactggtgtgatgatgactgtcataccttcaacttgccaatgagagagatactgtctcttatagctaagcttaaggaaaaagataagatcctgggtgtcctttttgtacaaaagtcacagaggtttaccactctctaaagtcctctagtggtacagagagtgtcaccacaggtccaaggacacaggagatattgtatttctggtatacacaccctgccaatccttaagatagtcatcctcacacatggacacaacccactggtgagatcctgaatctcatacgtagacacagtctacagatggaattgtgtcagtcatatgtgaacatctggacacatatgggatagtgacccatctctaaatccagctcataggcagatgagtactcttctatttagacacagccaattggggaggtgttgactctcatacctgagcttagaatgacaggtacaatcatgggcccatatcagcatgaaggtcttaatgcagattgcaactcacatgcatatcatattgtattacttcattttcacactgctataaagaactgcccaagaccaggtaatttatgtagaaaagaggtttaattaactcacagttccacatggctggggaggcctcagaaaacttacatttatggcagaagaggaagcagggaccttcttcaacaggtggcagcagggagaaagtgaatgaagaaggaacttccaacatttataaaaccatcagatctcctgagaactcactcactatcacgaaaacagcatggaggaaactgccccatgatccagttaccttcctgctttgacacgtggagattacaattgtagatgagatttgggtgaggacatagagccaaaccatgtatctcataaattctttgggtggtacagagagtgtactaatagcctagctgaaaggtaagattgtgacagtagtaagcagacacagtcaagagtaaagattgttgtcctctcacatgagcatggcccactgttgaggatttgaatcttatatctagaggcagtcaaaagttgcaatgttgactctcattcatgaattcgttatgcatggattttgtgacccttaaaccataatttagcacacgtgtcaggctgtgacttttctaaggggacacaatgcccagaaaacattgagaagctgctgcacagatccagttcacagttgaggttgtgacttgtctactttacccatcatacaagacatgtggactctcatacctagaaccagaacatgtgagggattggtaatttcatccctgtattttttgaaggtctgattgtgacatacacctctgccaaacacctgatttgactctcctgcctggcttggttcacgggtagaattgtgatatattgctggacccagcacccaggtgagatgactctattctcaagccttggtgcctcttacaggaggcactgtgacatatcgctgggatttgcagtcaggtaatgtaaattttctctcctaccttggtgctgccaataaggggcattgtgtcatattgctcattttaacacccaggtgatgtgactcttctgcctgggtccagcctaaaggggggattgtgacatctctctgcactcatcacccaggtaatgtactctcatctcttgcctggtttctgttcacaggagggaaggtgacatatctctgagctcagcacctagctaatgtgacacttctcttcttcctaggttctgcccacaagggagattgttacatatatgctgggcccagctttaagatgttactcattagccttgtccctgccttcagaaggcattgtgacctattgtgggacccaggaccaaggtgatgtcactttcttgccttgactctgtcaagaggaaacatcgtgacgtatctctgggtccataaaatatttgatgtatctttctgttcttaccagggttttgcttatagaaaagcttgttgcatatctctgtgcccagcatctcagtgatgtgactccctctcctgcctgggccatgtccacagatgaaaaactggcttatccctggggcccagcacacaggcaatctgatttatttctcctactctctttctgcagggggcattgtgaagtatctcttagcccatcaactatttgatgtaaatctcttctattacctggggctttgcccataggggaggttgtaacatatctcatggcccagaatgtaggagatgacactctgctctgattgttaatattgctttgctcaccacttacttgatatgactctcctctcatgcattgtccctgccccttcgggtgattgtgacatatagctggctgtagcccctaggttatgtaactttcctcttcttcctgagccctacccacagaaggcattgtgctgtatctctggggctctcacctaggtgatgtggctctcctgctttggtcttcctctcagaaagtattgcgatgtattgctggacctagaacctagatgatgtggctctcctctactgtttggtctctgaccaaaaagagattgtgatgtatcactaggccagcatctaagtgttgtggctctctgctctctcctaggcactgcatacattgcgtatggtgacacatggctggatccaaaaccaaaataatgcaactcttttgcattggcaacgtccacaggtgtattaccacatatcttttcctttagctctgaaattgagctctgaaataatatggattttttatctttgtgcccatctctcctgttgagtttaaactttaatccagggctgggcacggtggctcacgcctgtgatcccagcactttgggaggcccaggtgggtggatcatgaggtcaggagattgagaccatcctggctaacatggtgaaaccccgtctctactaaaaatacaaataattagcctggcgtggtggtgggcgcctgtagtcccagctactcgggaggctgaggcaggagaatggcgtgaacccgggaggcggagcctgcagggagccgagatggcgccactgcactccagcctgggcgaaagagctagactccatctcaaaaaattaattaattaattaattaaataaaataaactgtaatccaaagccatgaaaatagtcataattactgtcacaaagtgataacttttttctcctcctccttcttttctcttcctcctttgcatctcctcctttccttttcctctcttcctcctcctctcatccttctcctcctctcctcctcatctcttcttcctccactcttcatgttctcctcctcttctttttctcctttctcccctccttttcttcctctcctcctcttccacttctcctctttcttcctcctcctctccttttcttcctctcatatttctcccctcctcctcttccacctcctactctccttcacttctcttcgtttcatcctcctctcttcctcctcctctttctcctctccttctctcctcctcactttttcctcctcttcctcttctctttctcctcctcctctcctccttctcctcatgtcctccttctcctcctcctctcctccttttcctcctctcctccttctcctcctcctctcctcctcctcctctcctccttctcctccttctctcttctcctctcctcctcctctcctcatctcttcctctccattttctcttccttcccctctcctcctcctctgccttctcctcttcttctcctttcctcttatttttctcctcctcatcctctcattctcctcctcctccactacttttctcctatttctcctctcctccactgctcttcctctccatttcctcctcctctccttctttttcttctctcctcctgctcctctttctacttttctcctcctccttctcctctcctcctgctactcctcttctccttttctccttctccttctcctctcctcctcctacttctccttctcctgtcctattcctcctctcctcctccttccccaaaactctcctcctccttctccactcctcctcctagtactcatcttttactccccatcctctcctcatctcctcctcctctcctctccttatttttctcctcctccttctcctgtcctcttccttcttctctcctctttcccctctttttacttctcctctcctcattcttttctcctcctccttctcttctcctcttccttctcttctcctcctccttctcttcttttcttctctcctcttcctcctccttttattctcttctccttttcctctcctcctcttccttcttctcctctttcttctttccctcttttcctcctccttcttctttttctcttttcctcctccttctactccttctactctccttctcctctcttcctcctcctcctctccttttcctcctctccttctcctcctcctcctcttccactgctcctccttctcttctccttcccctctcctcctctttctcctttccttctgttcttttaatctcctcctcctctcctcctccttctcctctcctctttattctacgctccccctccttcacctcttgtcttcctccttctcatcttttactcctctttctcttctacttcttctcctctcctcctctcctttccttttctttctcctgctccttctcctctcctcctcttcttctctcctctttctccttttttcctcctttccttctcctctcctccttcgcctcttctccttctcctactcatcttttactccttcctcttcttcttttcctctcctccgttccttttctttctccctttcctccttctcctctcctcctcttcttctctcatctttctccttcttttttctcctatccctctcctctcatcctctgccttctctcatctttctccttcttttttctcctatccctctcctctcatcctctgccttctctcttcctcctctgctttctcctctcttcctcctccttctctcttcctcctttttctcatctcctcttccttctcctttcctcctccttctctttcttcccctccttcccctctcttcctcttctcctcctcctatcctccttctcctcctccttcactcctactcgtgttcctctcttcctcctttcctcctcctccttcttgttctctccttctcctttttctctcctcttcctcctcctcctctcctctttctctccttctcttctcctttttcattcctctttctttctactcctctcttcttctctctcttctcctcctccatctcctctccccctccttttcctccatttcctcttccttccccactcctcctccttctcctcttcttttcctcttccttctactccttcttctactctcctcctcctctgcctctcctccttctcttctcctctcctcctccttcttcactcctccttctcctctcttcctctttttcttccttctctcttttttcgtacttctcctctcctcctccttcttaactcctccttctcctctcttctttttcttccttctcttttttgtacttcttctgcattccccctcctctcctttttctcctcctcacctactttttctgctctcctccttctactccttcttctcctcttctcctccacttcttcttttactccttctctttttcctcctgcaccttctcctctcctcctcccctccttttccttctttttccctcctttttctctcctcctccttttccatttctcctctcccatcctcctcctccacttctcctcttgtccttctcttctccttcttctcctcttttcctcttcctccttctcctctcctcttccacttcgtttttctcctctcctgctcctcttcattttcccctccacctccttttcttcttcttctcctcctcctctcctcttgctccttctcgttcttcccccctttttcttttcccttcctcctcctcctctccttctcctttttactccactccaccaccttttctcctcctcctctattttccatctcctctcttccttttcctcttctttttctcctcttcttcctctctcctttttctgtctcctcctcctttcctcgtcctcccctcctttttctcttttctttctcctcctctccttctcctcttcctcctcccttctccctcctctccttttcctctcctccttctcctttcttcctccttttctcctccttttccgtctcctctcctcctcctcctcttctcctcccctcctcttctccacctttttctctcccttcttctcctctccatcttctcttcctctcttacttttcctttctttcctctttcttcttctgctgtcctcctccttctcctcctatatttctcctctcctcctgttcctcctcttcctctcctcctccctttttccctctcctctttctcctcctccttttttcttctctcttttggcttctctcctccttcttccctccttctcctcttcctcctcattttcctcttctccttcttctcctcatcctcctctcctcctcctttcctccttcccctcctcctcttcctcctactctcttcccccctttctcctcttcttttctttttctcctactttcctccttctcctcaatcttttcctcctttttagctcctctacttctctctctcttctcctcgtcctccttctctcttcctcctctcctcatactccttttcctctcctccttctcctcctcctctactcctttttctcttcatctcctccttttcctttttctctcctcttcctctcctcatcctccttttccttttttctctcctcttcctcccatcctctttttccttcttctcttatcctccttctccttctctttttctccccttctctttctcctccttctcttctcctctcatcctcatttcctcctcctcttttcctccttctctttttctcctcttctcctcctcttctaattctccttttctttctcctctaatcctcctcattctcctttttttctactcctccttctcttctcctcctcctctccttttttctcctcattcttttcatctcctccttctctttcatcttctcttcctccttctcctcctcctcttcctcctccttttctattccttctcctctcctcctaaatttcctttttcttttcttccatccctttcttcctccttttttcttctcttcttctcctcttcatctcctactcctcctatttttctcctcctctcctttctttttctcccctcctctttcttttctcctccttcttctctatttctcctttcctcctcctctccttcacctcttcatctcctcctccttctgctccccattctccttctctcctcctttttctcttcgtcttctcctccttcttcttgtccccccctccttctccatctcctctactcctcttctcctcctcctcttcttctcctcctgtcctcctccttctctccttcttttcctcctttcctccttttttctcctcctctccttctcctccttctttttcctcattctcttattcttctcctccttctccttctctctctttttaatctacttcctcctagcttcccttttttcctctcctctcctggtcctgttgtcctcctctctttttttttctccacttcctctcttcttcctatcttcttctccttttctcttctagttcttctctttcctcctccttttcttctcttctcctcctcctctttcttcactcctccactcctactcctcctcttactgagccattagccatgccaagcagcatccagcacacgtagtggcagcctcttcagcgctgcactagaaagacctgatgtacatttatattagcttttggaggatagtattaatccagcctaactcaggcggccaagtatatatatgtaatctatctatctatctatctatctatctatctatctatctatcatctattctatgagaaagaatcttgctctgtcacctaggctggagtgcagtggcacaagattatgattcactgtgtcctcaagagatcctctcacctcagcctcccgagtagctgggactacaggtgtggcccatcacacctgactaatttttttttcagtgaccgggtctcaacatgttgcctagactggtctgaaacttctgggcgcaagcgctccctctgtcttggcctcccggaatactggggtgaatttatttcttacagaaccgccctgattcagatggtgcaagcctcgcaggccagaaacatcttcctgacgctgctccccaccttctgccctctctttcccagcatccttcccctgtggaaagagaaactttccttctaaggtctttccagcccctccctggcagggaagcctggaaactagggcccctgctttcccctgcagtcgcaaagcatctgggtgctggccaggaggtggcctcctggggtgctctcaccagggtgtttggtggaagcccctgacgcaccctgctctgtggatttgatcttcctgggcagaggacactggcttcgagggggcagcaggcagccctgcgccctggccctttcctggctggcggttttggtgtggctgactacctaccaccttgggcgcccaggaaagaagggggccagggcctggccatgggggcgcctatcggtccttgcccttccgttggctaagtgcgtgttttacagagatccgtcggtgtggattgcaccttccttgttttacagggatccgtcgatgtggagtgcaccttccttgcagtcgggggctcggtgccgggtgccgtcgttagtccaggaagaaggcggggagcttctcccgctcgaacaatttgcagctagttccggggcttcccttcctcctcccacaccggcccgcatcctagtgttgctttctctgcccccagcaccagcctcttcttgggctccctcctccccttcccactcgcgtctcttaggaaactgcgaccctagtgtttgctaaggagcaggggaggtccttcccgtcgccgacgccccccgcccggaaagcggcgcgttttctgggccgagggcgcatcgaggatgtgacccattccctggccaagggtgtgggtggggaacggcaaccgatctcactgcctggcggggcagcttcctttccaggcaaggcggagacctgcagggcgtggagaccccgcccggcgcagaacgcgctggccagtgggcagcttgacagggtccccgtgtgcctagcgaccctcttcagcgctgcatccatgagaggttataaatgaggcggaaagaatttttccctgctcagcggatttgtcctttttctctcctgactggataggagatagaacacagatacagcccagatccggggcagcagttcacactccattacaaaactctacacagcttccgagctagcagcagcacacattcagggaacattggagggattttcttcttcttttgtgggtggtaatgttggtggttgtggagagagatagaagagtgaataagaaaagtataacgatttggtaggctgaaaaacctgtctgggattttcattaatagaaaattgaactcttgtccttgtttaagagttcagatttaagcttagccctttcaaagtcaatggaaacaaagtttgccttttagataggaatgctgaaaataatgagacacttctgtctggaggaaacaaaatgatttctgcaaaggcagagtcgccagtccatccccatatatttgagggttttttccttttttagatatgtgtggtctctgcacctatgcacaatgttactgaagtatatttaatagaagtggaaagtgagggaaagggaattgcaaatagaagaatgtgattttgttttcatttttttcatacctgtgaaaagcattctctagatttgatgctttttcaagtaggcagtatagtttctaaaccctattttaatcagggagtctgttagagaccacaatcttggctaaaacctctttggaaacacacacacacacaaatgcttaattctgtgctaccttcaagagttggcagaatttttgcaggaatgagtatgagttccttctaaaggatcttgtgctccattttaggtaaatgaagttgccctatcttattttattttattttattttattttattttattttatattttattttattttattttattttattttatttatttttgcgacggagttttgctcttgttgcccaggctggagtgcaatggcacgatcttggctgactgcaacctccgcctcccaggttcgagtgattctcctgtctcagatttcccagtagctgggattacaggcatgcaccaccaagccctgctgatttttgtatttttagtagagacagggtttctccatgttggtcaggctggtcttgaactcccgacctcaggtgatccgcccacctcggccacccaaagtgctggtattgcaggcatgggccaccgtgcccagcccttatcattcttaaaaatactgctaaactggttgcatattaggatatctcatttttaaagggtttgctggatgtgcgagacttttaagaagtgctactgatgcttatggatatatggaatatcattctctggggttttctatataccactttatttctcatcagaaattcagactcaaagcccttagcgtgccagacacgagtttgttatgtgatggttaacacgcatttcactgagctggtacaggtgatacattcatacctaacttgttacaccatctaagtgaccgtttgatgaaagggtcttttattttaagtttattcaggcagacttttgaggtcttatttgcatctggcaaaggtacagcatgttgaaggagaaaaaataaaccttaccttattattcctgcattagatcaatagctgtttattggccacctggtctgtgccaggcactgtacaacatgggtgacctagtaataaatggatggtaataaatgtagttgccagccggtcatggtggcttgcacctgtaatctcagcactttgggaggcctaggcgagtggatcacttgaggtcaggagatcaagaccagcctgaccaacatggtgaaaccccatttctactaaaaatacaaaattagccgtgcttcttggctcatgcctgtaatcccagctactcgggaggctgaggcaggagaatcacttgaacccgggaggcagagattgcagtgagctgagattacagcactacactcaataaataaatgaataaacattgttgccctacatcaggagtcctcaacacccagggcacagactgataccagtctgtggtctgttataaaccaaaccgcacagcaggaggtgagcagtggatgagcgaggcttcatcaggattcacagccactccccatcactcgcattacaaatcagcagcagcattagattatcgtaggagtgcagaccctattgtgaactgcgcacgtgagggatgtaggttgtacactatttacgagaatctaacgcctaaggatctctcactgtctgtcatcacccctagatgggaacctttagttgcaggaaaacaatcccatggctctcactgattctacgttatggtgagctgtataattatttcattatatattataatgtaataatagaaacaaagtgcacagtaagtgtaatgcgcttaaatcataccaatagaaaaccatcttgccacatccgtgaaaaaattgtctgtcacaaaaccagaccctggtgccaacagggttgaggagcactgccctacattgtacagtgcctgacatacaccaggtagccaaaaaaattcttagtggggttaattagagcttttaaaaactgtatttgtctttccctagcttgctttgtattttctcttttttccgtgttctcagagacaatggggtaggactatataaatgtgtgatatttctggtagtttaattactttaaaatgttctttattcattttgatgtaccttcttggactaagttattttcaccctgcttctttgaaatcattcaggaaagattccatgtttatactcagaacaacactattagggttgggtgggtatgttgacccattttatagctgctttatgaggtacccagtggctggcaataaattaagctcagcatccacaattcctaactaccatctagctccatggaacacctgctttatagagtcagcttgatctcaaaaaaaaaaaaaatcatagatttaaatgtatactgcttatttacctctgtgtatgtgtgttgttatttttaataaagacctttttttttcaaaataaatttgattgaatttgaaggtataagggaatttcaaatgaaactttagcctctggtgacgttgccattgatgaatatgatgatagacatcttttcagtagcctttctacctcatgggattgttgtaaagataaataaatgttccagaaactcaaaacctacatatggaataaagtggtttattttgagatcaggaagttttgtgggtatccactgtggatttcctttccagaattttgaatttttgagtgatttgctttggggaagggtgctactggccttaagtatacagacactagaaatgctgctcagcatattacaatgcacaggatagccacaaatgtcagcagagctgaagtcaagcaagcctgcttgagaggtgtagtagtggcctttattgcatccacaagcacagtgggtgcattccctgtattgcatgtgctatatttagaaatctgaaattccataaagtaagtaagcttttatttgcctctaagatgccatggttggcaaggtcaaagttttacaagaagcttgggattgaggaaaacattaagtggtattcagtgtatttgaaaactccatagtaaataagagctctagaactcatcagcttcttcaacaaatgagatgcattggctctgtaaagttgttttggtaggtggctcctacctgagttatttaggaaattcgctctgatgctgtcatctgccagtctccctcatgttttcagttacgtggagtatatcttttaaaaaaattctttgaactagctcttactagcttgatagttaatgtttttgcattcatagtctcccttattttaatttctcaagtttttgcaaaattcttacataactatctgcccttttcatagactggtgtttctgagccaggtcttctgtccacacatgtcgtcttgagagagtggatgttagccagctgccctggctgagatggatggggacaatacagggatgcaataaaggagacagtgataatttatatgatctgggaccccaggcctcacaccagaactgtctagtatatgtttagcaaataagtgccactgatttgacctttgtcctgcccttccactttccaccctactacacaagcaggaaatatgcacgagataaggcaggaagatgaggagactgaattccagaaaagaaagggctgcctgcagtaagcagacagttgcctccacagtggtctgggctcccacttaccttagagacatgtgcaacacttgagaatagttgttttaaaattctgaaatcagtggacagactgtaagcatcccattgcagtcagttgccaggtacctgttctctgcagcaacctttcacctcccatacttgggagtgagttctgttcctgcagagtgccctgtgcattctggtgcttttgtgccctctcctttaacctataaactgacaactctaactctacattttcacttacaatttttctgaagcagtaatcttttgtgatcctgatcacactacaagtccctcaccctgcaagtacttgtaaaaatgaaagtaatgtccattccttctggaaggtgattgccatgcacacaacctactaggccaggaacattactgatggctgtcctgatgcatgtctctctcacccccatgtccaatcagtcaccaggctctcctcaaaaccatgcttcagtcactgactttggctgtttaatcacttctgacctaaggccctcattgagtcataagcacctcttaattttctgccaccagtttctctctactgctgttaatcttccagcttgctgccagagtcatcatcctcaaaaacaaaagctgctgtcattgtttgcctgcctaataacatctcttgcctccctgctgtctgcaaaaagaaaaatccaaactccttcacttgttttacgaagacccatatctgcttccaaaccaaattgctagtcttggctcttgtctctgtcttccacatcactgacacactgaataattctttactgcccctgctgttgcatgggttgttctttttgttgtgtctccatccccttcccccagcaaagaatatttactctttactcttcgttgagacccatctcaaatagtaccttttctagggagaattaggccttctgttcctaataacttttaccctcgtctatcaagtctgtctgctgtaatttatctgttaacatgtttctcctacctcaaggatattttttccatcttctgtacctagcacaattgcatggctgatgctcactgactactgcatgttgatttacttattttattttacttgtttgagagatggagtcttgctctgttgcccaggctggagtgcagtggtgcaatgtaggctcactacagtctctgtctccctgtttcaagcaattctcctgcctcagcctccccagtagctcagattacaggcacccaccaccacgtccagctaatttttatatttttagtagagacaggtttcaccacattggtcaggctgggaaatgaagggatgggccaaattaaaggaataggttgggctaattaactgcagcaggagcatgtccttaaggcatagatcactcatgctattgtttgtggcttaagaatgcctttaagtggttttctgccctgggcgggccaggtgctccttgccctcattctgctaaacacacaaccttccagtgtgggtgttatggccatcatgaacatgtcacagtgctgcagagattttgtttatggccaatttcagggccagtttatggacagattttggggggcttgttcccaaaaactgtaaatgaagtaattaaaatggccagccaggagtggcggctcatctctgtaatcccagcactttgggaggctgaggcaggtgaatcacctgaggtcaggactttgagactagcctgggcaacatgccacaactgtatctctataaaaaattttaaaaaatagctagatgtaatggtgcgcacctatggtcctagctactcgggaggctgagataaaaagatggtttgatcctggaaggtggaggttgcagtgagccaagattgttccactgccctccagcctgggtgacagattaaaacccatttcaaaaagaaaattaagataaaaattaaaaatgtgtgggaaaaaagatggaaagacaaacacaatataataaaacctgtgagataaagcaaatataatactaagagggcagtttacagcctaaatgactgcatcaaaaaagtagaaagcttacatattgagcacctgacatcacacactcttcaaggaactagaaaattaataataaacaaaattccaagttagaagaaaaaaataacaaaaatcagaacagaaccaaatgaaatagagatgaaaaacaataaaaatgatcaacagaatagagttggttttccaaaaagacaaaatgggtaaattgctaggtagattaaccacaaacagaatgaaaatctaaataaacaaaatcagttatgaaagaagacattacaatggatacaacagtaatacaaaagttcactagaaatgattataaacatctagacactaataaacctgaaaacctaaaaagaatgaataaattcatgaaaacatacaacctcccaagatagagccaggaagaaatagagtacctgaacaaaccagtaatgagtagcatgattgagtcagtaataaaaagtatctcgacaaagaaaagctcaggactggataaacgcacagccaaattctaccaaatatacaaagaataataatcctccttaaactcttcccaaaaattgaagataattaaattctccctaagtcactctgaggtcagtatcaccctgataccaaaactagccaaggacacaacaaagaaaactattattatattattattataaaaaatagacaaatgggacacaaaagagtttttgcacagtaaaaaaaaaaaaaaaaatcaacaggataaataggcaacctacagaataaaagaatatatttgcaaactatgggccaacatgaaaccaatattcagaatttacaaataactcaaacaattcaaaaatatcataataataagaaatcccattgaaaaatgagcaaatactactaagcatttttcaataaagacatacaaataaccaacacgcatataaaaaacatgctcaatctcaactaaaaataaaactacgatttgattcagaaacctcatcattgggtatctactcaaagaaaattagtttattacatgaaaatgatacctaatatcacctacaaataggcaactgcaaatgaaaacagtgatgaggtatgacttcaaatctgttaaaattactaatatcaaaaagaaaaaatagaggctgggcacggtggctcacgcctgtcatcccagcactttgggatgccaaggcgggaggatcacttacgttcggaaattcaagaccagcctgaccaacattgggaaacaccatctttactaaaaatacaaaattagctggtcatggtggcacatgcctgtaatcccagctactccagaggttgaagtgggagaatctcttgaacccagaggagaatcacttgaacccaggaggggaagatggtggtgagctgagatcatgccattgtactccagcctgggcaacaagagcaaaactctgcctcaaacaaacaaacaaacaaacaaacaaaaacaaaaaggaaagaaagaaaagaaaaaatacagaaatagcaagtaacatctgtcattgatgttcctgagatttctgaaacaaatcttaatgtcaccactgctctcacacacttcagatatgatggaaaaagaaaacttcagaaatgatctaacatgcacttcctcaaaatactcagagatattcttatatccccccttgaagcaatggaagaggaggcatatcatgcagcaccttataagccataaagaggactttagctctcacggtaccttcaaaggaaaatcactaaatagcaagtaacgtccatagagaatttaatggtatgggacaaatgatgctcctatacaaaagctacagaataaaaaatggctttttaggaaacatttccactgaagcagagcatcccataccacattttaaggtctgcaattctttttgacctttgtacctctcgtctgtgttatctgcttcattcatgcttacctgcctgagtatttgaccactgtctcatgtctcttcacattccaggggtcttttatttgctcaaggcaggagatgcgatcaggtttagagacagcaaggcctgttttgttagaaaaaagtaacataacttgctgagattctacagttaccaaccttgtaccatgttcagtagagaggagaaaatatgaaagattctagaaatttaattccaaaatactgttttctgacagaaacttttgaatatttagaacatattttacatttctgggtccttagctctactattcaatattattgaatttaaaattggtgctggatattgaattttaatatttgggcaagaatatttaatgccactgaatttctagaatgaccattaatctagagtgaagaatacagattagctcaagaaaggggaagtttcctgttaaaacatcttgaagattttcttttctgttccagtaaaccttcaagttttccttaaaagtgttgatctaaaaataatttgtgcagaggaaaaactgccaaaatcattctacaaagggagaaaatagaagccttagggtgtattagaaaacctggggaaaatgtattgacaccgagagaccagttttcggcagttctctaacactgcatctctgaacaaatttcactgagcagtattcagacattccacacctcctgagagaattctatggccacagccttgaaagttaacatttcctaaaataaacccaaagacccacacatacttagcaagtggtcataggcagaattattaattttactctaagtgtttgagagttaagagaactggctctgtttcacataagagactggcattatccaataaaatattgttcaatagagaaagattctctaatgtattccttcattctgaggaaagaggatgaaacaagatccacaaaaccagtgtatgtattatagttttctgaatgacacagcataatatttatggcaaaaacacaagcatttacagttttgagtgccatatatacattatacagagtaaggtgtgtacagttctcatatggagaagtcacagtaagttagaagttacctctcgaattttaatgcatacattaataaactggagattttgttaaaatacgtattctaattcaagagatctgggatgagacctgagttactgtattgctaacaaactcaccaatgatgtcaatgattctagcttaagaaaaatactctgtaaaacatctagtaagtgatagaacctgggttttttccccatgtatatgaccagtaaacaaagatgacagccttcattttccaaagcaatgtataaacaaagagaaactattaagaaaaagagtgtaagaaaaatggatgttctgtggtcaaaaataggccatggtaaacgtctggttcagcatgactcagttagtttagagtgcaggtgcaccattctacttattatgtaacctggttgtataagctcatacttggctctgatccactattgagtgaaaagagtacacagacaggtggacaggagggagagggagagtaaagctgctcaccctgtacacagggctcgtgctcaggcttgtgcctagagagaaaaaaaagccatctcaaaaattcccatagttccttgattgtttttccagcaacccaccactcacccacccactcctgttagacctcagattaggctggaacctgacacttggcatgataggggagctttcagagtaaatgtgattgtttatgcacattagtcacctctccaaaatacctattaataatacagtttttaaaaagaaacattatagtgaagaaattcttcagaaaacacgttaaccaagttaataaaattaatgggacagattggtatcaggtgctgatacatataggaggatgcaacatgactctgtgagactactggccaaaaaacataaattataatctgaatctaatcatgaaaaatgtgttttatgtaaagttcaagccacatatgttgcccatgttttgtaatttctagtagtgtatctaaaaactcttttagcattctagaaggcaaatttctttgaattcattcctttaaatatctttctaaattattccaggctattaatttcatccttttaaagtgtgcatttaaaaattatgttcttcatagagctgatggagccctccgatggaacccaaaaggtgcggttttctccctcactgatatctgaggacccagcaccatccccaataagaatgttttatatccccacctgcccaggctgatctgtcaacaaagggaatactctcaatatttcagggtataaattcaaggtattagttgtgatatgtaagaagcctggatggagagaataaagataaggttctgatatatagaagtgaattattttaatgaggtcctttcactgtcacgagaagacaagagaaatgtagttcaaataatcttgttaggcaaaagcatcagaagtagaaatgtaaattattgcaattctaaatacatgacattctagaagaaaatgtggacagaattttgacctgggacacacttacctgacaatcaaccatttcttcctctcttctctgattccttctcaggagagattatctgaacaaatcaccatttcatcttgagactgtgtctttaaaggcatcaggacagactctctgaaggaagcagactgctcctgcaggaccctggagacaccccaaatactgtgagtgccacaactgcagaagtgggaaagggagatcctcctctcctaaacacacaaccccactggagaagctgaaagtctgtttgtgggagaagtttctaactacctggagctgcgtcaagttagagagccaagctgagtgaaatacaggggtgtaggaggcaacaaagaggccctgggagctcgctgaatccccaaggagcccattcctgcctagcaccacagggatccatcaaggggaggacagaggagcagggggtaaaacttccaaggggagaaggacttccctagctgaactttgtaacaatttgaatggggcaagaagacttatggccagaacttgggggaaggcatgaatccggcttgaagacttcacaggcatggaagaactaaagcccttttttttcccgcagctgggagacagaaagcctggggaaattttcaagcccaactcgccctccacctggaaacagactcaggtctgttatgaagggcacagtgagagtgagaccagccctttcgtttgcatgggagctgagtaaggcctgtgactgccagctttcccccacttccctgacaccctgcatgactcagcaaagacagccataatcctcctaggtacacaactccagtgacctgggaatctcacccccatctgccacagcagcttcagcaacaaccacccaaggagactctgaactcaggcatgcctagcaccccccgcacccattggtctttccctaaacaccatggtagcagaagaaaaaggacatataatcttgggagtcctgggttcccacccactgctagtccctttcaacagtactacagctgatgctttctggaaagcactatctcctggcaggaggtctaccagcacaaaaataaagcattaaaccaccaaagctaaggacacccatggagtccattgcacccttagccacctccaccagaacaggcactggtatccatggctgagagactcataaacacttcacatcacaggactctgtgcagacaaccccaagtatcagtctggagctgggaagactcattgggtggctagatccagaagagagacaaccaatcactgtagttcagctcacaggaaaccacatccacaggaaaagggggagagtactacatcaagggaacaccctgagggataaaaaaaaaaaatctgaacaacagttttcagctctagaccttccctctgaaagggactacccaaatgagaaggaaccagaaaagcaaaccaggttgtatgacaaaaggaggtttgtcaacaccccacaaaaaaaaaaaatcacactagctcactggcaatggatccaaaccaagaagaaatccctgatttatctaaaaaaagaattcaggaggttagttcttaagctaatgatggagagacaagagaaaggtgaagcccaatgcaacaaaataaaaaaaaaatcatatgagaagtgaaggaagaaatattcaacaaaatatatagcttaaagaaaaaaaaatcaaaaattcaggcaactttgcacagacttttagaaatacgaaatgctctggaaagtctcagcagtaacaagtagaagaaagaaattcagagttcaaagacaagatatttgaattaaccaaattcaacaaagacaaataaaaaagaataagaaaatatgaacaaagcctccaagaagtctggaattatgttaaatgaccaaacctaagaataatttgtgttcctgaggaagaagacaattctaaaagcttgaaaaatatatttgagggaataatcaaggaaaacttctctggccttgctagggacctagacatgcaaatacaagaagcacaaagaacacctggaaaattcattgcaaagagatcttcgcctaagcacactgtcatcagcttatccaaagtaaagacaaaggaaagaatcttaagagttgtgagacagaagcaccaggtaacctataaaggaaaacctaccagattaacagcagactacttaggagaaaccatacaaactagaagggattggggccccatcttcagcctcctcaaacaaaacaattatgtgccaagaattttgcatccaatgaaactaagcatcatatatgaaggaaagaaacagttgtatttttagtagagaagggggtatctccatgttgatcaggttggtctcaaactcctgaccccaggtgatccacccgccttagcctcccaaagtgctggcattataggagtgagtcactgtgcccagcccagaaactctttaaagcataaatcaaacaagacttataaaataaaaatacaagttaaaaaaaaatacccgatgcagtggctcacacctgtaattccagtaagcactttgagagactgaggtgggtggatcacaaggtcaggagttcgagaccaccctatctgatatggtgacaccctgtctgtactaaatatacaaaaattagcccggtgtagtggtgagcacctgtagtaccagctactcaggaggctgaggcaggagaatcacttgaacctggaagacggatgttgcagtgagccaagatcgagccactgcactccaccatgggtgacagagcagactccattccaaaacaacaacaacaacaacagcaacaacaaaacaccaaagtatgcagccaacaaagatcatgatgaatgcaatggtacctcatatttcaatactaacattgaatgtaaatgacctaaatgctccacttaaaagacacagaacggcagaatggataagaactcaccaactatctgccatcttcaggagactcacctaacataaagactcaaataaagtaaaggggtgtaaaaaggcatttcatgcagatggacaccaaatgtaagcaggggtagctatgcttatatcagacaaaacaaactttaaagcaactgtggttaaaagagacaaagaaggacattatataacggtaaatggcctgacccaacaggaaaacatcacaatcctaaacatatatgcaatcctaaatatacaaacatcacactggagctccaaaatttatagaacaattactaatagacagaagaaatgagatagacaccaacatcataatagtgggggacttcaatactccactgacagcactacacaggtcatcaagacagaaagtcaacaaagaaacaatgaatttaactacaccttggaaaaaatggactaacagatatacacaaaacatttcatccaacaaccatggaacacacattctgctcaatagcgcatggaactttctccaagatagatcatatgataggccataagacaagcctcaataaatttaagaaaattgaaattatttcaagcactctctcagactacagtggaataaaactggaaatcaacacacaaagaaactttcaaaaccatgcaaaaacatggaaattcagtaacctgctcctgaatgagcactggggcaaaaacaaaatcaatatggaaattaaaaacttttctaactgagtgacaataatgacacagcctttcaaaacctctgggatacaggaaaggtggtgctaagaggaaagttcatagccctaagtgcctacatcagaaagtctgaaagagcagaaacagacaatctaaggtcatacctcaagaaactagagaaaagagaaacaagaacaaaccaaacccaaacccagcagaaaaaaaggaaataaccaagatcagaaaagaactaaatgaaattgaaacaaaaaaaaatacaaaaggtaaatgaatgagacaaaaagcttctccttaggaaaaatacataaaattgatagaccattagcaagactaagaaagaaaaaaagagaaaatccaaataacctcactgagaaatgaaacaggagatattataactgacaccactgaaacacaaaaaaatcattgaaggctagtataaacacctttacaaaagaactagaaaacctagaagagatacttaaattcctggaaaaatacaactctcctagcttaaatcaggaggaattacataccctgaacagaccaataacaagcagggagattaaaatggtaatttaaaaatcaccaacaaaaaaaagtccaggaccagagaggttcgcaacagaattgtaccagatattcaaagaatcagtactaatacagagaaagaaggaaatctctctaattcatcctatgaagccagcatcaccctaatacccaaaccaggaaaagacacaacctaaaaagaaaactacagaccaatatcattgataaacattgatgctaaaatccttaacaaaaaattagctaattaaatccaacaacatgtcaaaaagataattcactgtgatcaagtggattgcataccaggatgcagggatggtttaacacacacaggtaaaacaatgtgatacaccacataaatagaatttaaaactaaaatcacaagatcatctcaatagattcagaaaaagcatttgacaaaatccagcatcttttatgattaaaactctcagcaaagttggcacacaagggacacagcttgatataataaaagctatctatgacaaacccacagccaacataatactgaatggggaaaagttgaaagcattccctctgagaacgggaacaagacaaggatgcccactctcactactcctcttcaacacaatcctggaagtcctagccaaagcaataagacagaaaataaagggcatccaaatcagtaaacaaaaggtcaaactgcctctgtttgctgatgatataatcatttaccttgaaaaccctaaggactcctgcagaaagctcctagaactgataaaataattcagcaaagtttctggatacaagattaacctacacaaataagtagcccttttgttcaccaacagcaaccaaacggagaattaaatcaagaactcaaccccttttacaataactcaacaaaaataaaatacttaggaacacacctaatgaaggactcaaaagacctctacaaggaaaactacaaagcactgttgaaagaaataatagatgacacaaatggaaacacatcccatgctcatggatgagtagaatcaatattgtgaaaatgaccatactgccaaaagcaatctacaaattcaacacaatccccatcaaaataccaccatcattctgaagatggtgagttagaaaaacagagttggaaaaaacaattctaacattcatatggagcccacatagacaaaggaaggctaagcaaaaaaaaaaaaaaaaaaaaaaaaatgaaggcaccacactacctgatttcaaactatactgtaaggccatagtcaccaaaacagcatagtactggtataaaaacaggcacatagaccaatggaacagagaacccagaaataaacccaaatagttgcagccaactgatcttcaacaaagcaaacaaaaacataaagtggggaaagaacacccttttcaacaaatggtgctggaataattggctagccacatgtaggagaataaaactggatcctcatctctcaccttatacaaaaatcaactcaagatgacttaagaacttaaacctaagacctgaaactgtataaattttggaagataacattggaaaaacccttctaggcattggctaggcaaaaatttcatgacaaaaatccaaaagcaaatgcagtaaaaacaaagataaatagctaagacctaattaaattaaagagcttttcacggcaaaaggaacagtcagcagagcaaacagacaactcacagtgtgggagaaaatcttaacaatctatacatctgacaaaggactaatatccagaatctacaatgaactcaaacaactcagtaaaaaaaaaattcccataaaaaagtgggctcttgattagacaactctcaaaagaagatatacaaatggccaacaaacatagatttaaaaaagctcaacatcactaatgatcagggaaatgcaaatcaaaaccacaatgtaataccatcttattcctgcaagaatggccataatcaaaagatcaataaactgtagatgttggcatggatgaagcaatcaggaaacacttctacactgctggtgggaatgtaaactagtacagccactatagaaaagagtgtagagattccttaaagaactaaaagtagaactaccatttaatcccaccactgggtatctacccacaggaaaagaagtcattatttgaaacatagaacaatgaaacagagaacccaaaaataaacccaaatactgattatagaaaaacatacttaaacattcatgtttctaggagcacaattcacaatttcaaaatcgtggaaccaaacaaaatgcccatcaatcaacgagtagataaagaaggtgtggtgtgtatatgtgtgtgtatatatgtgtgtatatatatatatatgttgggatactactcaaccacaaaaaggaatgaattaacagcatttgcaatgacctggatgagattagagactattattctaagtgaagtaactgaggaatggaaaaccgaacgctgtgtgtcctcgctgatatgtgggaggtaagctatgaggacacaaaggcataagaatgatacaatagactttggggacttggggggaagagtgggaaaaaggagggatagaagacaacatatatggtgcagtgtatactggtcagctgatgggtctatcaggatctcacaaatcactaaagaacttactcatccaaccaagtatcacctgtaccccattaaattatggaacaatgagattttaaaaaaaattattcttataattacagactagctcacataatgaatacttcataaactattacacaggctgggcacagtggctcatgcctgtaatcccagcactttgggaggccaaggtgggtgaatcacctgaggtcagtagtttgagaccagcttgaccaaccctgtctctactaaaaatatgaaacttagttgggcatggtggcaggcacctgtaatcccaggtacttgggaggctgaggtagaagaattgcttgaaaatgtcatgccaaggttgcagtgagccaagatagcaccattgcactcccgcctgggctatacagcaagactccgtctcaaaaaaaaaacaaaaaaaaactattaaacaaacaaacaaacaaaaattatgggtctaacatgagtaatagtcaacttaaaacagagaattttcatggggagattctgaagcataagccaaggattatacagtaataaattcaatacaaagcagacagaatagatttgctttcagcatttttgagaatttctttctagtaaattagacaccttcttaaaatgatttattttgctccaaaattgcttttttctgctaaaaatagtttcaaacttacaataacacaaatacatttactccaaaatttatttacacctaagatttatctttagactaatagatgtatatttaactctgtaaatcaatactaacagtccatatgtgcatgcaagcagaggccacattttacttatgtttctacataattttcattatgaccataaaagtgatcctgcagtcaataacaatttaattgtacatttaaaaataactaaaactagttagttatttgaagaaatgaattgcttgtaatacaaagaataaatgctacaggtaatggataactattttcctctaatatgattacatattgcatgcctgtatcaaaatatgccatatatggcatatgcatatacacatattatgtatccacaaaaattaagaaaaataaatttaaacgtgaaaataagaataaaagtttcacctataggaacaatattctgtaacttattgacaatttaaagccactggcaaaaaagattactagagatttcagtccattatcttaccaaataatatattgttaccatcttttacctacacccttgagtaaggtgtaataggctaaagttagtggcataacacttcaatgaattcatgacagtatttaaactgttaaaaatgtttaaatggaaagttgacataaaatttataatttaaaagtataattaatattattccataaaagtacaattaataagataacatactaacttaaacaaaatttaaaagtttttctttcctaataatgcagattactctgaacacctacctcatacatcactcaatgttataagttaaccacaaagagcctctctacttaaattttcatcatgaatcctacattataatgtccttacccttccatagaaaaggtcataaataacacctacctaaaaaaaagaatctttcgtatcttttattcagcaatgtttagtcacatattttcacatgtgaatacaccaggaatgatgaaacagcatgaagtaatttaagacattaattccattattattcactttttaaaaattccatattttcacaaaaagtatactttgagtgtaattacatctctccaaaatttttttttaaagttatatacaaataatgtttatatgaactttagtctgtattttttatactcagcattctgatttagtataatgtctaaagtttgagtgtcctagatatttctactgtgaatgattccctgatagttacatagaactaactaactttggactgaatatctttcatatttaatgcatctgcaaaaatacattttagtataaactctttggtgttttataatttgcagtttttgaaaaaaatgtttttccaaatttattacattggcagggttttcttcagtataaactccttgatgttgaacaaaattttaacaactgcctcaagattttcctctagtacaaaatgtgtacaatacgatctgtgatacaagcaaagatattacaaccctcttcatattggtaatgctttttcaaaataaatactcttctgcactttatagacatattttctgatagatcttttgatagtaattaaacttttaatgcttttatttagtatgaattctgattttgagtaagatttgagcaggtattaatggcttttttgtcaatatttgtacattggttctcaagtataaatgctttacagtgcaataagatgtgagcattggttagaagcttggccacattgttcacaccgtcaattttctcagcatgaattatcttatctataatcaagcgtgacaatcatttaaaggctttgtcacattcttcacatttctagaatttgttggcaacatgtttttatgtttagaaaagtttgaggtgttgtcaaaagcattgtcttttctttcaggtttgtagagtttctctccaatatgaataatcttatgtctgttaagaattgaggacttttttaggctttccatattattaacacttgtaagatttttctccaatatgacttatctgtagtaataagtgaggactggttaaaggctttgccaaattttttccatttgtagggttgctgtccagtatgaattttcttatgtgtagttagggatgaggatgagaaaaaggctttcccacattcttcacatttgtagggttttactccagtataaactacctcaatgtttattaaaagttgaagataagttaaaagatttgccacattattcatattatcagggtttctctacagtatgaattttcttatggttagtaagaattgaagactggttaaaggttttgccacattcttcacatttgtagggtttctcttcagtatgaattatcttatgtttagttagatttgaggaccatttaaaggctttgccacattcttcacattggtagggtttctctccagtatgaacaattgtatgtttcgtaagatttgagtaacgattaaaagctttgccacattcttcacacttgtaaggtttctctccagtatgaattatcttatggttagtaaggattgaagactggttaaagcttttgccacatttttcacatttgtagggtttctcttcagtatggattatcttatgtttagtaagagttgaggacgagttaaaggctttgccacattcttcacatttgtagggtttctctccagtatgaatcatcttatgtgcagtaagggttgaggattgtctaaaagctttgccatactcttcacatttgtagagtttctctctagtatgcatcctcttatgtatagttagggttgaagatcggctaaatgctttgccacattcttcacatttgtagggtttctctctagtatgaattttcttatattcagtaagggttgaggaccatataaatgctttgccacattcttcacacttgtaaggtttctctccagtatggattatcttatgtgcactaagatttgagaatcgatgaaaagttttgccacatacttcgcatttatagggtttctctgcagtgtgcattctcttatgtttagttagggttgaggaccatacatatgctttgccacattcttcacatttgtagcgtttctctccagtacgaattatcttatgtgtagtaagggttgaggattggctaaaagctttgccacattcttcacatttgtagggtttctctccagcgtgcatcctcttatgtttagttaggtttgaggaccatacatatgctttgccacattctttacatttgtagagtttctcttcagtgtgcatcctcttatatatggttagggttaaggatttgttaaacgttttgccacattcttcacacttataaggtttctctccaatatgaattatcttatgtgtagtaagatttgaggatagactaaaagcttttctatattcttcacatttgtagggtttttcttcagtatgaattttcttatgattagtaagggttgaagaccaattaaagatttttccacgttctttacatttgtaggacttctctgtagtataaatgcttttatgctgggttttgtgtgaaagcatgcaaaatgatttgacacatttttttacatttgaaaggtttccttccagtgtgtcttatgtctgtttgaatttacaaatttataaaagactttcaaacatttaccgcattgaaatactttgctctgggtagttgtgtaacacaggttaagtccattataaccttctttgtgcaccttaagctcatccacactttgagccttttcttaactgtaaattctgatgtccacatttttcatatcttcttggtattactttttgaaaagaatcttccataccctgttctggccaaaggtcttgagcaacatgagaatgtataactgaaaaaaaatttttataaattactccacttactagactcacatgaatatagtttaaaaatcttacctataaatttataccatctacataaataaaatggctttgcaaaataccacaggccctaattctttcacagacatacaaatgtaacaaaaatatagagaccaaaatacatctgtggaaaatttataaatgagttgtgtgcagtgtcccagatgagcacaatgtgaaaaaccacatagaagaaaaagagaagtctgataaatttacccaacacagcttttcctgcttctcactgtaacataatgcctttagaaagggcagcctggccagcatggcgaatccccatctctactaaaactacaaaatttagctgggtgtggaagtgtgtgcctgtaatcctagctactcaggaggctgaggctggagaatcgcttgaacctgggaggtggaggttgcagttagctgaggttgcaccagtacactccagcatgtcgggaggatagagtgaggctctgtctccaaaaaataaaaattaaaaggaaacagtgatgtgccatttacaaacacagtcttacgagataatctgtgaagagttaacaaaaattttgcaggccataagggaactgtgtgatgtagtcataaaaaagttgtgagaaaaagcagctattaagtgagaataataccatcagtgaatctgttctgccaaataaaaatatagaaactttccaaaataaacaagttttaaaaaagtatattggtactgcttatgtcctacatataaagggtgctgaaaatattttactgaaaataacatgattcaaaaaaacaccacataatcatacaaaaataattttctggaaaacatacacaaataaacaaaattagaatttctgagcattatcctagtggtgcaaaaaacatttctaattattctctgaaatttgaaagaaaaaagtatagaaataattataaatatctgttaatgaatatacaacacaaaaagacataactagcaatgtcaatgaaacttgagggaagatgaaaaagaatttttgtatgcaacttatttttttaccagattaaaatatattgttgtatttttcagaggttatatgtaatccccaaagtaccacaaacatattcgtataaatacacaaaagaggttgggtgctgtggttcatgccagtaatcccagcacttcgggaggccgaggcaggtggatcacaaggtcaagagattgagaccaccctggccaacatggtgaaaccccgtctctactaaaaatgcaaaaattagccaggcgtggtggcagatgcttgtagtcccagctactcagaaggctaaggcaggagaatcacttgaacccaggaggcaaaggttgcagtgagccgagatcatgccactgcactcccacctgggtgaaagaacaaaactccatctcagaaaagaaatttaatggttaaaaaagactggaagtagacattccatgcaaacattaatcagaggacagcataaacagtcaaaataatcatacacaagctccatcttaagtcaaaaagtataatattttataaaatgtacttgaaattaaaactccaaagaaacaaagaagaacatcaaaaaataatcgattcattaactgggaacctattacaaatttctctgtgtgtgtgtgagtgtgtgtgtgtgtatgtgtctcacattagtgttccaaatatataaagccaatattgacagaatggaagaaacacaaagaaagcagtattattatagaaagatattttaataccacactttctgtaacaaaaataaaacaagaatgttaataagggaatagactacttaaaggcagtataaaacaattattccgaacagagtgatggagaacattcctcaacaacatcagaatacatacccttctcaatagctcatataacattttccttgatagaccacatcttaggccacaaaggaagtcttaccaacatttttaaaggtaaaattccatgaactactttctatgaccaaaatgatatgagagtatactatgatgagaacaaaaatgaaaaatttacaaatacacagaaattaaacaaaacactcttaagtgtgctcttacacaaaagttgaaatagttaaattgtgaagaggtccattgtgctcaatgcaatttacatatttaatgcaatgttttccaaatttctcattgcatttttgaagaaatagaaacaacaaccccaaaagtatatagaatcccaagagactataaagtgcccaacaatcttcaaaaaaaagaaaaaaatgctggaggcatttaagttcttaattcaaaatacattacaaagctacagaattaaaatgatttgctattagtataaaggtaaaaaagtagacataaaatagaatgcagcacacatataaactttcacatatatggtcatataaggagtcatttacatactcataattattgcagcattgttactgtaagccaacaggtgaaagcaacccaaatttctttcaccaaatcattcagcagatgtaatttgaaatataaaaattgtgaggccaggtgtggtggctcaagcctgtaatcccagcactttgagagggtgaggcgggctgattacctgagactgagagttcaagaccagcctgaccaacatggagaaacctagtctctactaataatacaaaattagcgaggcgtcgagacacatgcttgtaatcccaggtacttggggggatgaggcagtagaatcgcttgaacctgggaggcagaggttgcggtgagccaagatcatgccattacactacagcctgggcaacaagggggaaactccatctaaaaaatgaaatagaaaaacgaaaaaaaattctggaatatcactcagtattcaaaaagaaggaaatattctgccaactataaatataaatcttgattgcattatgcaaaatgaaatgagtcagccacaaaaagagactgtatgagatatatgaaggagttacacttttagaaacaaagaacagagtgatatttgaaaagtgccataaaacagaaaaaactggggccaggcatggtggctcacacctgtaatttcagcactttgggaggccaaggcaggtggatcacctaagctcaggagtttgaaaccagcctggccaacatagcaaaactacgtctactaaaaatgcaaaaattagccaggcatggcagttggcacctgtaatcccagctactcaggaagctgaggcactaaaattgcttgaacctggaaggtggacgttgcagtgagctgagatcgtgccactgctctccagtatgggtgacagagcaagactctggaaaatttggtagacaatggaaaaattagtagttgtttaatatgtattaagatttagctttacaagataaaaatgttttagcaatatgttccatgacaatgtcacgataaactgaatatttaaaaatattttgtggtaaattttgttatgttttattgacaagtaaaaataaacaataatacctaaaagatacatagttatgatagttttaaattatattcaaaaccaaatgtgtttctcccatgcaaaaatcacatatattcacaaattaataggatgttgaaattacaagaatttcatgacttctcatctacacaggattaaaaaactattcacaacaaaccttcacaacaaatatacaagttataaaaaaaaacaaggataacatttttccaggcaaatagagataattctattggaaaagacatatggctaattcatatatgattttgctccacaatgtcttaaattgtacaaagttaaatattggcatgcacaattagaatatatactaaaaaatcaaaacacaattaacagatgtgttgtgacataccctcaaatacatatatatattttatatacaaaaatataaaattgcaaaataaaattaaaacatggaatgtaaaacttattagataccatcaactagatcaatatattcattaaggaagaagaatatgagaaaaaaataatagaggttacttgaagataaaaaagggtgagaactttccacattttgacgtaataaaagaaaaaattctaaccaataatatttgatttaaatttattttactttaaaaagaagatgaaaataaaaaaatccaagataaaggatgagggtgttcatcaccactagcacagttttatgaaaaaatgctacatgggggcaggcactgtgggctcatgactgtaatcttatagttttaggaggccaaggctgtcagaacactagagaccaggagtttcagatcacgctgagtaatccagggagactctgcatataaccaaaaaaatgctaaaatgagtcaattttgtttaaaaataaaatactggacagcatcataaaaccatacataaaacagagcgctctattaaatgcaaatatacaaatatagaactctttactatcataatgatgatgtatacaagtcttaaagctattctgtagagtatttaaaacagaaaaaccggcataaatgttaatatacaatataaaataatttttaatattaataacaaactgaaaaatatagaggtaaaatttttatattcaatttaagttgtcatgagatttaaatatattgttttaattttaagatgtttcatgtaaactccattttttaagatgatatggtttggccatgtcccaactcaagtctcatctttaattcccacatgttgtgggaggaaagtggtggaaggtaattgaatcatgggggcaggtcttttctgtgctgatctcacgacagtaaataagtctcatgaaatctgatggctttataaggcagagttttcctccacaagctctctttcttgtctgccaaccaggtgagacatgcctttcaccttccagcatgattgtaaggtctccccagtcatatgaaactgtaagtccaataaacctctttctgttgtaaattgcccagtctcgggttatatctttatcaccagcatgaaaacagactaatacacaagatggttatgaagacaatatttatagaaactatgcaaaacaaaatgtaaaaaataattgaagcacgtcactacacaattaaaataaaatttaaggcaataaaacaatatattaaaaaacccactgaggaatacataaaacaataacaataaaactaataacttcattttaataaataattttaaatataaattaattaaactacttaatagaaagaaatgtaatctcaggactttcggaggttaaggtgggctaattactggatctcagaagtttgagaccagcctcggcaatgtggcaaaactttgtctcaaccatacatacaaaaaacctagctgggtgtgatgctacacactacctgagaggctacacacaactacctgagaggctgaaatgacagaatcttctgagtttgggaggttgaggcttctgtgagccatgatcacaacactgcaaaccagcctggttgagagtgagacctatctcaaaaataaatgaataaacaagtaattaaatgaaattataaaaagaaaaaataaaatgccttagtggcttaagaaaaagccacctacaagggactcattttagcactgagttaaataggctgaaaaccacatggtgaaaaaaaaatttattttatgaaaatagtaactacaattgggtattagacataatatcctttaagtcaagtgctaacgtgagacaaacattgatagtatatattagtaaaatgaattgatttaccacaaatctataactattctttctttcttttcttctttccttctttccttctttttctttctttttctttctttctttctttctttgtttctttctttcctttctttatgtatgtgtatatataacatcaggctccaaaatatataaagcaaatattaacaaaagtaaagcaaaaaatacatagcaacataataattgtagacatcaagaccccattttccatcatagaaaactcacatagaaaaatcaattaaaaaacagaaaacctagacaacattatagactgtattattttgcatatagaggaatacttgagagtggataatttataaagaaataatgacttcaccatttctgcacatataaatacagataaatatttaatagggggataatgcctcctagaaaatgggtgaaaatatttacaaatcatatgtgataggagtcaatattcaaaaaatataaacaacttttaaaaccgaacaatagccaggtgcggtggctcacatctgtaatcccagcgctttgaaaggccgaggcaggcagatcacgaggtcaggtgttcaagaccagcctgatcaacatggcaaaactccatctctactaaaaatacaaaagttagccaggtgtggtggcatgcgcctgttatcccagctactcaggtgactgaggtgggagaatcacttgaaaccgggaggtggaggttacagcctaggcgacagagcaatactccatctcaaaacaaacaaacaaaacaataaagttgaataactttatttagaaataggccaataattgaaataaattttcatcaaaacatttgaaaggacacacaaaactaatttgtagagaaatgcataaaaatcacaatgaatgaaaaacaaaatcccctcacactcatttaaatggccactatcaattttttaaaaacaccaaacctgtcgatgatgcaataaaaatgaaacccttggccgcgcgtggtggctcaagcctgtaatcccagcactttgggaggccgaggcgggcaaatcatgagtcaggagttcaagaccagcctcaccaacatggtgaaaccccatcactgctaaaaatacaaagttagttgggttgattgtcggtggaaaataaggatgcacccattattttataacgttataaatgtacttcaaataattaaaaataaattatcaaatacagcaattccatttatgaatctatatctaaaatatgcaacataggaccttgaagacatgttcgatacaatgaaatattattcagccttaaaaaaaaatcttctcacatttaaagatacactctgagaatattatgtcaactgaaataagccataatgaaatgatggatgttatgatttcacttatttaagacatataaaatagtctcattcataaaaacagagtgtggaagggcggttctcaagggatggagagagtgtaaaatggataaacgttatttaatgatactgagttttagttttacaagatgtaaaatttcaagaagtcttttgcataacaatgtgaatatacatgacatgcctaaaatatacattttgtttttgtttttgttttcagactgggtctcaatctgtcacccaagattgtgtgcaatggcgcaattatggctcactgcagcctcagattcccagggtcaaataatcctgcccctcaatctctcaagtagctgggaccacaggtgcacaccaccgtgcctagctatttcttagaaaaaaaatattattagagagggtgtctccatattttgccgaggctggtctcaaacttttgggttcaagaaatccccctgtccttgcctctcaaaatcctggttttacagatgtgagccaccaccatgcctggccctgacatgtacatttaaatagatttaagaaggtaaattatgttatgtgtttttacaacatttttttttttaaaactggaaaaaatacagaattataaatctttttaaaaattaccttcggatcacaaaagtgtttctctcacacaaaggaaatacatattcatcattaaacacatggtgaaaataagactatttccaaggccactcacttagaaaagataaaaccaacattgaaaatgagctaagaggcagggcaaggtggctcatgcctgtaatcccagcatttttggtggccaacgtgggcagatcatctgagatcagaaattccagaccagcatgacaaacatggagaaagcccatctttactaaaaaaaaaaaaaaaatacaaaagtatctgggtgtggtggcatatacctgtaatcccagctactaaggagcctgaggcaggagaatcacttgaaccagggaggcggaggttgcagtgagacgagatcctgcattgcactccaggctcagcaacaagagcaaaactccatttccaaaaaaaaaaaagaaagaaaatgagctaagaatgtatgaatgtatacaagataaggtatagccaaaattggggtcatatttgcagataaaaacacacacatatatataatttgattgtgatacacatggctcatttatcttttaattaaaacttacattaacttaaagtatacaaacaactgctaattgtctaaaattataatacttaaataatagcaatagacacaataaactgatgttaacaaacttacactaaaaagcacactaactgcaagtacaactgcaagacaataataacagaaatgcttagtcataaaatctagttggcaacattaatgtacattaacaaataatttgtctagataactgcaatgtttgactgtaactgtgcattcatggaaggcaggcatttgaaattactggcatccattttatggcaataaaatttcagagaaaatgcagaacaatcataaatgggagatgctaatgagaaacttttaatagatttaagcatttaaaaaaactagtgccaatttttacgttttaaatatacgctatttttaaacaaaatataactactgtaatccaagtttagaagcaaagaaaatccttacactgcttttatatatatatacacatatatatgtatatatatacacatatggtcagagcctcctatataaaatgaatatttggggaataaattatgttattatttagatataggctgataaatttgttgaaaattctataattcctttttgtctgcctgcacactaattatctaatttaattcaggcacaacatgtaaattctagtatagtaccctaaatttctgaatctaaaattacagacaaatttgaagtagaaaatagaaagtaaaaatgtatatggagagtgacattaataagatttttttaaaaaggtgccctacttgcttatcccctgaaagcaagaaaatttgtcagccattcctgataaaaacgcctttatgagagaaccaggcatcatggttcacacctgtaatgacaactacgtggcaaaataaagtaggagaattgcctgcagtcaaaatattaagacctttctgggttatgtaggaagacccccatttcaaaaataagtgcttttaaaagagctctgagatccaggaagggagctgtgaaactctgctgaagcccaagactgaaggtaattctgtttagaagacaggccctcattcaggtggcaaactacaggactactgtttttggctacagacaagaaaacgttccacctaacttggttccactgagaattttaaacttactctgtaacaatcccaaactcttcccagccatagtctgggggaggtcttgcccttccagaggcctggaggaagacctgcatttatagccatgcagtaggcctacagacctttgcctttactgtggtccctgaagcagttccatgatgcagttccagctccctgagccacagttcatggccggttctgcccatgtagaaacccaaagtgacctgggaaaattctctcttgtacttggtgaaagccatgctcatccacatcctgatataaagcccaccatatgcaggcctgactgcagaaacctgcccttgggtttgccctgcagagcacctaagtcctgaaggatattcactctgtccaaaaattaaatgagaattacaactatccaagccccttttaacaagaccacttaaatggattcttgtgcaaatccagaaggcttaaaaccaacctaaaacccctcttcactacaaacccagaggcattctatcactctggtggcctaataaaaatagatttttcctttctgaaaccagtttataaaatcctgaagaggtgtttgctccttcaaatttacacacaccaatgcaaaactattgtttcttattgtcaatgcttctattttaacattgcactgaaggcatgtgaaagaagaaatagtcaaaagaaaaatttaaagtcattgaagttgaagtgcagtaagtaaaacgtttgtttgtagatcatgtaatattaatatataaaaaataaaaagtacataaaaacctgtttaaactaatgaatacactcagttaattagcaaaatataaaattaacatacaattctgagtaatcattccatacacttaaaacaaactctctgacagaggaaaaaacaatcttatttatgatagcataaaataatccattttagaacaaatttaattaagcagctcataaatctttttttttttttgagacaagagtcttgctctgtcacccaagctggagtgcagtggcataatctcggctcactgcaacctccacctcccgggatcaagcaattctccttcgtcagcctcctgagtagctgggattacaggtgcccgccaccatgcccagctaatttttgtatttttagtagagacggggtttcaccatctcactggtcttgaactcctgatctcatgatccacccgcctcggcctcccaaagtgctggaattacaggagtgagccaccaagccaggccaagagctcataaatcttttaaatgaaagatatatcaataaaaaaattaggaaacaaataaatttaaaaatattttatttctattgaaagaataagaattgtgaaaatgccatattatccaaagtgatctctagattcaataaactccctatcaaaattccagatgtgatgcaaaaagagaacttaaaaatagtttaggccaggcatggtggcacacgcctgtgttcccagcactttgggaaggcaaggtgggcagatcgcctgaggtcaggagtttgaaaccagcctggccaacatgatgaaacttcatctttactaaaaatacaaagtattagccgggtgtggtggcgtgtgcctgtaaccccagctgctcaggaagctgaggcaggagaatcacttgaacctgtgaggcagaggttgcagtgagctgagattgcgccactgcactccaactttggcaacaaaagcaaaggtgcctctcaaataaaataaaataacataaaacaaaataaaatggtttaacagagtatctcaaaattatgcagatatgtatctgtccacaaaaacaagaagtcagattgtgcactcttttatatgccatgaacagtactttggctgtcactgtaaacttcaacgaagatcactgaagggaaagtagaattcttagagattttataagcataagcagaagatggccctatgtgagagtgtaatttttaaacaatttcaggcttcccagaaactatttccttaggaacacagcttcccaaatcgctttaaagacttactttcttcttgactttggacctctcatccatgtcgtctgttgtattcactctcacctacctggggtttcatccaccatctcatgtcgcttcatattccagggctcttttccttgctccagacaggtgatcaggtctggcttagagaaagcaatacctgttttattaaaaatagctaacatgaattttgttcatattctccaattaccgacttagtaatgtgctcagtaaaaaggatataatagattattctaataagtttatcccaatatactaatttataacagaaatttttaaatatttagaaaatattttaattttgtaggttcttaatttcagtgcctgccactgctgaataaaaaaattggtgaagcagatagattttaaggtgtgaataatattttatgccactaagcttctgaaattaccactaatctaaaatgaaggacacagatcagctcaggaatgtggaaagttcaggtcaagatgaaacatcttcaataaattttttctaaacagacaactccccaggattttcttgataacagaaatatgaaagcataagtaccagaaaacattctacaaagagaaatgaaatttttattttatattgaggaattttgtattaaagttatcctcacccaggaaggccaggtttatgtagttctctaacatcatcttcctatataaattcttctgtgcagtgtccaggtactgccactcctccagagagaattctatggccacatccctaaatgtcaacagtccctggaaaacacacacaaacacacatatttacaaagtggctatgaatagaattttttatttgacacaaggtaaaatcagaaagtgaatagaactggttctgacttaaaagaatgattgaaactatccaataaaataattgtcaacacacaaacgttttctaaggtattctctaactatgagataagagagtggcataatatccacaacctcagtgtatatgtgatacttgtctgaatgacaaaagtgtaaaattgagggcatatcacgaacatgtacatttttgagtgctatatttacataatagagaattagttgtgtatatttttcagaagaaaaagacatagtttatatatttcagacaaaatagacatgttgagttagacggtaccactcaaattttaatgtgtacaataaactggacatcttattaaggcagattattttttcaggagatctgaaataaagtctgaggtactaggctctaccaagctcaccagttatgccaatggtttggcaccaaaatactattttgtcaaacatccagtaagtggaagagcctgtgttttttttcagtttttctggcctgtaaacaaagatgagaatttcatttaccaaagaaagataaatgcaaagaaaacctttaaaaaaaaaaaaagcagctgccagattaaatgtgatggtttatgcacatcaactgcataaaaatacttaatgaagagaaaaataactctatagtgaaaaactctgtaagagagtttattaagtgagttattaacatcaactgcactaggaaaactttttatagtgtgctgatccacccagaaggacacagcatcactactgagatatggcccctactaaattactgtctgaatttaaccataagaaaacatcatttttatggaaagtacaagatacaggtatcttccatgttctacaatttttttttttttttttttttttgagacagagtctcgttctgtcgcccaggctggagtgcagtggcatgatctgggctcactgcgagctctgcctcccgggttcacgtcattctcctgcctcagcctcccgagtagctgggactacagacgccggccaccaagctaactttttgtatttttagtagagacggggtttcaccgtgttagccaggatggtctcgatctcctcgcctcgtgatccgcccacctcggcctcccaaagtgctgggattacaggcgtgagccactgtgcccggcctatgttctaacatttttaacagtcattttaagtagttctttctttagcaccctaataagcagttatctcctggtattttttcagaactttccaggtaataaatgccaacctatttaaatgagcattttcttaaccgtgtaatgcatagagtttgaacacagtataagaaattcttcttcaaatgtttagctagcttaagtttctttgcccttctgttccctgttttcaaggccagactttcttattctgtatgttccccctgccctggtaaacaaccttctcccagtttttatctatggagcccacattccaaatctattatcgactctgtgaatttcccctcccatcgcaatggctacttccgccgaaactgatcttcctgccttcccaaccgtataactgcattcctgcatttttcaagttagccaaatgggtttagtttagattatgcagtccaactccagccagcggaggcaggacacagtaacaagaaaaagctgcatcagaggtaataaaaaacccctactttcctttgttcatgtgcaccctcctgcagcgtaagctttaatttccatatcagagttattaacttggtttttgaaactaaaactaagtgttagaaacattcagcaaaattactcaaacacagtgttcatgtaacggaagaacattttaaggcgcttacactttatacctcaaagaatagcaaaagtatttattcctttcaggcaataaatgtattattttattatttgtattaaaactcatgtaggaaacaattagtcagccaggtgcggtggcttacgtctgtaatttcagcactttgggaggctgaggtgggtggatgacctgaagtcaggagttcgagaccagccgggccaatgtggtgaaatccccatctctactaaaaatacaaaaattagccgggcatggtggtggaagcctgtaattcaatctactcgggaagctgaggcaggagaatcgcttggaccagggaggcagaggctgcagtgagctgagattgcactattgcactccaccttgggcaacaagagcaaaactccgtttcaaaaaaaaaaaaaattagtcacttggaaacacttataggaggcaccaattttcattacataaaatttagcaataaactcaaaaatcaaaataacaggatacagggccaggcatggtggctcacgcctgtaatcccagcactttcggaagtcgaggtggatgtatcacttgaggccaggagttcaagaccggcctaacatggtgaaaacccatctctgctaaaaacacaaaacgtagccgggtgtggtggcacatgtttgtagtgccagctactcaggaggctgaggcaggagaatcgcttgaacctgggaagcgaaagtggcagtgagctgagattgcactccagcctgggcatcgttgtgagactctatcttaaaaaaaaacacacacacacacaaaaacaggatatagaacaaagatattcacggtcaaaaatttaccctgctaacaaaaggaactgaagttttcaggaatctatgtaactaaccagttaccaaccacattttgtgtgtgtgtgtgtggaaatgtattcattgtctatagctgaaattgaagagaaatttttctttgttttcttccttggtagctaccattctaaaagctagatggactgtatgaaatcactctgccataaaaacacacacctgagaaaatttctaaactcactctgagaaagaaaaaagtaagtgaaaattttcaacaaacaaaatgtattattagatattaatgtttttaagactcacctgccaggcgcggtggctcacgcctgtaatcccagcactttgggaggctgaggagggcgaatcatctgaggtcaggagttcgagaccagcctgaccaacatggagaaaccctgtctttactaaaaatataaaaaattagccgggcttggcagcatatgcctgtaatcccagctactcaggaggctgaagcaagagaatcacttgaacccaggaggtggaggttgcagtgagccaagatggcaccattgcactcctgcctgggcaacaagagtgaaactgtctcaattaaaaaaaaaaaaaagactcaccttttttatgtcctttgtaaatattttcttacctttcaagctctactactaaaatgcaatatacaattaaaaaaaaacagctgggcacagtggctaacacctgtaatctcagcactttggaaggcccaggcaggtaagtcacttgaggccagaagtttgagatcagcctggctaacatggtgaaactctgactctactaaatatacaaaacccagcagggagtggtggtcaacacctgtactcccagctacttgggaggctgaagcatcacccgaacttgggatttagaggtttcagtgagcagagatggcaccacttcactccagcctgggtgacagaggaaaactctgtcttaaaaaataaataaataaaccttaggtaaattaagtgaataaatcttttcaaggtacagatatgtcttattcatgtgtcacatcaggccattccgttacttgagagattgccccaccccaccctgcacacttaagtgctcaataaccctgtctcaggagactctgaactatgacccagagagtgcctcaggcacattttactctgcaagttcttacaccatctcaatggagtcagctttttggggtttggtggttttcttgtctttggagtgctgattttttttctagaatttttttactgtttttcttgtactatttttctgtcccctaaaggaatccaggacacagaaattatttttctcctcaatactggtatctgattggctgaccagcaatgagtctccaagaaatgaaagttgggttggatgaagacaatattaatgtctcaaggggttaactttgaaaaaaaaaaaaagtacaccaggaaatgcctcttagcctgagggcatccatgtgtgcacttgagaagctacactcaatacctcaggttgccctatgagcaaataagccccagggctgatattcactagagactctagcagacatagttatggtaggtattgtggtttttcccatacaatactgaaatccaggtccaagaaaaccggaagggtgactgaaaacacatcaccctataatgtttctaaaaaaaaaacttgacccaaaaacattctgataagatatctgtgtcaacggaaaatagaaggaaaaaaaacccacagagatattttacaatagtgtcagattattctttgcttaactctcataggaaatatgtacaaaaaaaatctttttaaatgtgccatcaaatgctttgtcaaaaaataattaattagccaggggcagtggctcaggtctgtaatcccagctctttgggaggcagaggcaggtggacttcttgaagccagaagttcaagaccagtctggccagtatagtgaaatcccgtctctaccaaaaatacaaaaattagccaggcatgctggcgagtgcctgtaattccagctacttgagagattgagacaagagaattgtgccgggcgcggtggctcatgcctgtaatcccagcactttgggaggcagaggtgggcggatcacgaggtcaggagatcgagaccatcctggctaacacagtgaaaccccgtctctactaaaaatacaaaaaattagctggggtcccagctactcgcgaggctgaggcaggagaatggcatgaacccgggaggcgaagcttgcagtgagccaagattgcgccactgcactccagcctgggcgacagagcgagactccgtgtcaaaaaaaaaaaaaaaacaaaacaaacaaacaaacaaaaaacagaatcgtttgagcccaggaagtggaggctgcagtgagcctagatgaagccactgcactccagcctgggcaacagagcaaggctctatctcaaaagttaaaaaaaaaaaaagattaattaaaataggtattaaaatgtatactaaatgacaaattgttgataaagtgaattagggaggggaaattggtatttgggaatgtcagacgaaactgaaaatttagtattttactgcaagccagagtcagactggaggaataggtgatgaggagtgaacttgaggccctgcttgtgacacgtgtgaaaaattcagaaaaaaaatcagtcccctgtggagtgtgaaaatcagtaagaggcaggaaattagattgaggtggctctagtccctggatttctacttcaaaaaaaaaaaaaaatctaaactgaagagcatttattggtaaataactacattggaggaaacaaaattcaggcttaaccaactataaactgccaattaagctgattacataaccagctttaccttgattataaaaattaagaaactatgctgggcgcagtggctcacgcctgtaatcccagcactttggaaggccgaggtgggtggatcatctgaggtcaggagttccagaccagcctgaccaacatggtgaaaccctgtctctacaaaaaataaaaaaaaaaaaaatggccaaatgtggtggcgagcgcctgtagtcccaactactagcgaggctgaggcagaagaaacgcttgaacctgggaggcggggattggggtgagccactgcactccagcctgagtaacagagagactttgtctcaaaaaatagaaaatcaaaacaaaacaacaaaaacaaaaaactacataaccgtaccaagccaattattgaatttggttttcttataaaaacctttccttcaagcgccttccatgaattgcaaattacaaactacagcagggtgctgctcaacaatttttgaatcaccctttgattaagttatttaatattttcgtggtgatgcccataaatttttaatagaaaaaaagggcctgggaatcccacggacaaaaagctcttcccattcgtgaacctgcaccccgaatcaggattctgccctgaccttcctcccatggtacttgcacaatctgggagagatgcggggctgcgggtccagagctgcccagagagggctccaggccaggacatggtcactgcgcagggaagagacaggccgtctggggggcccggctgtcagtgcagccgccatcttatggctgaaggggactgaggccgagctgggcaaggagaactctgggcgcagattgtggagatgactgcggagaggcctgagtcccatcaaccgcttcccaccggttccaaccaggctcgtcccttctctcgggatgtcggactcagcactttcaccatttctaggcttccagggggtcctcgtgtctcagctgtgaatgtccaatacctgcaggtcacagggccacagaggctgggcctctaaaagcagaagacacagaggaatgaggacaacaccaggaggaacgactgaagccagaggcaaaggccccaccaaataccggaagccgccctgttccctccagctgtgtgtctgattggacagttcccaggacagcgtccctgattggataacgtttaagacccccgccttctcaggccctgagtgatggaagatgtggtcagaggttggactgaaagaagaaagattgacagcctaagttgtagccttttcaggcaaggtttcttccctgagctgagccaggccaatcccagagcacgggaaaattctctctcttctttgctctctctttttttcaatgtattcaaaatgtaaactttttttttttgaaacggagtttcgctcttgtttctcaggctggagtgcaatggcacgatctcggctcactgcaactttcgcctgctgggattaagcgattctgctgcctcagcctccagagtagctgggactacaggtgcacaacaccacacccgctaatttttgtatttttagtagagacgggatttctccatgttagccaggctggtttcggccttctgatctcaggagatgcacccgcctcagcctcccaaagtgctgggattacaggcgtgattcaccacatccgccaactcgatattatctttaaagcaaaattaggaatgcctctgttctccagatattgggatatctagacagtcctaagtctggttctgcttagtaaacattaattcgttcccttaatcgtaaacatctagaggctaggaatgtctaacttgctgagaatgcagcccagcaagtctcagcatcattttcctagccctctctcaaaatggagtagctctggtataaatgcttctgacatattttcccccttgttttacaagaggatccttaatcctaagagttgcagagagacaaagattcaccttctgtaaatttttcaggctgagtaggggcgatgatattcctgactaactgttggggcctcttgcattcagagtagagagaaactcagtcagacagtgtttgtatagtgaaggtcgttcataacttcaagttccaaaaaaaggtgattactggaagactaataaatgtccaattcaagaaagcatttagtgagcttgtcttgcatttctacacaaagagtaaaaccacaatatatttcacaacagcaaagcaaaattagtaaaattatcccaggtaaactaaacaggaaggctctgcaagaagtgggcagttgttggaaccaagctgatacgtggttgactgatagtgcataaaaatggcagagatatgagtgcttaaaacttttatagcctgggtaatattatgtgaatagtctgaagcatacacacaacatttggttttgatcaaagcacaggtttccttttgggtctctgttaaaatgtctgcatgcccaacagtttgtttgattatgtagagaggatgaagtctgtgctcactcagtaaataagttactctctgcatgattccaacttatacccaaaagtagaatgccagtctatatctttatgttacctatccctttcatttcttctgaacaggagtcaaaggtcactggctcatgggaataaacaggatcagtctcttgtgttccgccagcctataggacttcataagagacaggtttaatttgagataagtggacccagctgtttattcccagaatttttaactgcagttggggtactaaagagaacttggtaaggtcccttccattttggggaaagttgacctgctggggatccttctttccaagtttttcataggaccaaatttcctggctgggttataaaaagattatcttccttagttgggaaagggagtctttgattttcatattcagagtgtgttttgtgcttgtcacataattctgtagcttgaaagtatctgtgtctattagaaggtatgtagctgagaaaggccttgcatgcattatttcaaaagagctgagctgcagatttcccttagcggccactggaatctgtaataaggctacagatagtaaagacagtgaggtctttgatgtttcttggcatagcatagcaagagtcctcttttgagtttgattagctatttttactttcaccaaagactgtggccttcatgctgagtgaaggcattactaaatttctagggctcaagatatgttctgtgtaattgtcactgtgaaagataggcctttatctctctgtaagctcttaggcagcccaaatctaggaattatttctttttcttttctttctttctttcttttgtttttgagatggattttctctcttgttgcccaggctagagtgcagtgacatgatcttagctcactgcaacctccgcctccctggttcaaacaattctcctgtttcagcctcctgagtagctgggattagagatgcccgccaccatgcctggctaattttttatatttttagtagagacagggatttcatcatgttggccaggctggtctccaactcctgacctcaggtgatccacccgccttggcctcccaaagtgcagggattacaggcataagccaccgtgccaggcgaaattatttcgtttagtaggaatttaggaacctcaattgccttttcagaccgggtaggaaaagccttgatccaaacagtaaatgtgtcaatgaatactaataaatatttaaaccttttacatgggggcatctaagtatagtctatttgccatctttaccacggtacattcctctatgctgaacaggccttactaaaggaggagataaacattggttggtcatttgcgttattccaggcacatagttcacaggctcgaattaccgggtttactgttttaagtaatcctttttctataaaaggccaacattaattgaaacagggaatctcttcccaaatgaacagagtcatacaaatgtttaactatttttcactgattagcacctcgcatcaacagtttatcaggagtgtctagcaaaatgcctgatatttcaataagcatccccctgtcatccactggtgtcctttagcttctaggactccttgtacttggtgtgggtttaaacctcagggtgttgttctaaagccagtttattggctttatctaccaaaagagaagttgctgcaactgccctgaggcatccaggcatgacaagaaagttatgtaagaaaaccaaagtctctaaaaaacagcttacagaatagataaaatggcatctatgggcttctcaatctatccctgtgaccatacagttttggggtgacagaaacccattataatgggtcaaaacagagtaagcagtacagaagaaagtttatatatatatatatattttttttttgagatagagtcttgctctgtttcttaggtggagtgcagtggcacaatctcagcttactgcaacctctacctctcgggttcaagcagtttctggctttttttttttttgcatttttattagagatgggaattcaccatgttggccaggctagtcttgaactcctgacctcaagttatccacccaccttggcctcccaatatactagaattataggtgtgagtcaccatgcctggtgaaagttaatattcttacctgccatggtgaaggttaccaaggcttctccagataatatggctagttgtctgattggagctttggtggaaggtctcgggccccatcacttttgggcacttgcctggctgtttaactcatcattagttagggtgccgatggctctcttcagaacactggattatccctcttccaatggccagttttcttacagtgtgcaccctgatttatgcccaaggcacagtgactcagatggccagctttggtcttcccacctttcagtttctattgttcaggccaagactcaggaggcagccccatgtgggaggttagcttaaggttgcaaccaagagctgcaccttgtgggaggtccttcttgctctttttgcttcctctactttttccctgttattaaaaactaaaaatgccatatccaaagctgttccatagaagtttggggacccacagctgcttttactagttttctatggtatcaggggcagactgggttataaaatggactcccagaagtgtttatcttttccttgaggcaggatcactgttagtatatctcctggttgcctcaactaaacactattgaaacagagctggattctcatctttgccctgagaaacttcgttaaccttttcacttttaacaggctatttcatgcctttcttcatctcttccaaaaaacaagtgaccatatgatctcttctcccaagtcctcactgcccctgtgatagttccactctagaacttgatctggaactgctatacctcctgtctgatatatattatggttctggttgtgagccaatatctcatctgcatgggtcctagctgtcctgaaaatgcattgtttcttttccactgtataacacagagacaacaaaacatacagatcctgccaagttaaactagagatcaaagttaacttctcaaactcatctgtgaattttcctggatattcagagaaataaccaaacttgtcttatatagagccaaaccagacatagaaaaggggccatgtcttctcacaggcctttttctccatttgcaacctctctaagtggacaaacatttccctttggaggttgataggcagctccactatgagtagtactcactgagctcagttattcaaggagtggtgggtatagaatgggactagatgggtaaggaagagggatgaagggtcctcaatagaactttcaggtggactaggggtagaaaggatggacacagctgaacctttagagctgacagaaagaggttctgtttcaccccaaaatgcccactgaaccaagtggccgggggtgggggggggcttgcaataaaggatcagcttgtctgtctaaatttttttcttctacttctctcaggaaacatgtccatgcctgctgcagggtttcattctgactgagcagcaaaaatgcttgaacatgaagtattttatcctattttccctaccacttacagaacaaatcgagttgaactacagtataagtacccattagaggcaatttttcttgtatctttctgaaattgtttgctgcttttccatgcagatcatccttaagaaagtgtacaatcttagcccaatctgcaatctctgttcctgaggttttagtaacatgatgtttctcttttgttgtagacagcactgaagatgagttttcatcccagggaacagaaagacaaaaggtcaagatgtgcttcaaaaagctggtgaggggcattgggtcaggaaaggccaggctgtctaagcattcagagaccccctgtgcaactgtccttgcaattaggagccaggccccaaaaaccttcccactgcgtgtgtctttgacctgtgctaggtcctgctgttgattagtgttccctactgagcagttaacctatggtttgagtatttacacccaggagaatgttgcaggccagccctcagtcaacttaaaataatcaaaaaggttaaaatgtaatctgaaatacatttactcaaggtcagatattgaggatgaccaccaggaaaacaaatttaagttgccctggatatatatttcaattagcagccattcaaagcaagtcttttcaaaaaaatgagaaggcagttcctaagttgttaaccaagaattcatatttaaatgcataagctattgattggctatatatattcttttgttttacaaattccagaaataatggatgagactgctagtcagaaacaaaatgtctataaacaattgcccctaatcccagcattctgggaggcctaagtgggcggatcacctgaggccagcaattggagaccagcctggtcaaaatggtaaaaccccatctctactaaatatacaaaaattagctgggtgtggtttcatgtgcctgtaatcccagctacttgtgaggctgagacagaagaatcatttgaactcaggaggcagaggttgtaatgaaccaagatcatgccactgcagtccagcctgggtgacaaagtgagacttcatctcaaacaaacacacaaaaaaagaatttcccctgtgtaaagttccacactttcatctccctggtcttgataaattgtgcagaccttacagagctgagactgctctgagctatttttattttcacctccttgctccggacacatgaactattaacaataaaaagaatttacataagaatcttggcaagccacaagaataatgccaggaggtgacctccaggaacctggctgtcaccttcttttcccaccttaccctccactcctcttacacacacacaccctggatcacaagaccaacaaaaccactccatcagccacagacagagaagccacagaagaacccagaaccactgcatggcccccttggaccaccctagaatgaacagccattgttaacattcaggagccgtttattcccatcttcacactacactaaataactttcaagagtcacaagataaactggctgaaagctgatgcttggaacatcccacatcccccaggagctcagtgctgcagtctcaggtacaaacctgcccatcagccattcaaatgaaacaattgttatcaagagagcagagtccctgcaatggtccattaatttagaaagtttattttgccacagttaagtaggagcctgtgacacagcctcaggaggtcctgatgaaatgttcccagggtggttggggtacagtttcttatacattttagaaagtcatgagacatcaatcaatatgtttaagatgtacattggtttagtcaggtatgatgggaaaacttgaggttggggcttctgcatcacaagtagataagagaaaaaagaataaatgtatttgagcccttgataagtctcccactgagtacacaatttagtctggctcagtgaatctgcattttgatattaacaatagagcagagaaagtaagcagatatgtatttgtctcaggtgagcctcagagggatgactttgagttctgtctgtcgtctactcagtagaaatattcttgtcagcaaattgtgaggtaggtgtatagcttttttatctgcatagctatcttatttaagaataaaatagaagacagctttgcttgacatagtttccagcttgacttttctattggattagtaattttgacatcctgagatttatttttctttcacagcggggaacttttgattatcaagtgtatctgtttaaacttgacaataaaacaatgtatctattcagaagtaacaaatagaggttaatggaaaacttataaaacaaatataactatttgtctttataatctttcacaatagcccatcttaggtcttccatttcttattcactataatttaaataaaattttttcataatgttatagttgatctctttgtctgcggcattaaaacgagggtgattccatcttgaatagtgtcaggtaaaatgaggctgagacctattgggctgcatcctcaggttaggcattcttagtcacaggatgagataggaggtcagcacaacttacactgtatttagcaatatgtcacaatcatccctgtaagcagggtgcaggcacaatacaggagtcagatatttaggtcatggatgcagagatatgtcacagagtccccaggggcagggtcaagaaaggagctttctattccctaggagttgagcccaccaatatatcacaatacccaaaatatgtgagacccaccccccccaaaaaataaagagaatcacatcaccaaggtgctgggtcaggtgatatgttgcaattgccatttgtggcagactccagccataagaacagagtcacaacacctaagtgataaaacgatatttcataatacccttctgaaaacagtccatgcagaagactcatattacgtaggtgctggtttcagccatacatcacaatgcacaatgtatgcagagaccaggcaaaaaaatgagtcacatcttgggcagagccaaagcagtaaatgagagtcacatcacctaggttctgggtacagaaatgtcacagtaccctctgaggaaagagccctggcagaaaagtcacatcatctaggtgagagacccagagatatgtcacaatgcaccctgtgagtagggctcagaaagaagagaaagatcacataacctaagagctggacccagctacatatcacaaccaccttagtgggcagggccaaagcatgagaagagccacatcatgtaagtacttgaccaagtgatatgtcacaaccttcactgtggacaggccccaggaaagagagtagagtcacatcatctaggtgatgggcccagagatatgttacaataacttctgtggacagggaccagacagaagaatgacatagcctgtgtgctgatctcagggataagtcactctcttttatgggagcatggccgtgagaggaaaggagaatcacatcttctaagtgctgcccccagagataagtcacaatctctcctataggccaaacccaagtaaaagagtcatagcactaagatggtaggttcacagatatgtcactatgcctgctgtgagcagagtttcaacagacggctcacattaccttgttcagtccagcagtatgtcatgatctacattgtgagcagaacctatttagaagagaagactcacttcagctaggtgctgggaccagtaatagaaaaaaaatcatttatgtgtgaagggacctggtagaaaaagagagtcacattacttcagtgattggtacagaggtgggtcataatgcttcctgtaggcaggacccaggaaggagagttacatcacctggatgttggacatagcaatatgtcacaataatccataattgcagggcacaatcaggagagtcacataaccaaggtgtgggtctcagtcacatgtcacaaagccctctgtgggcagtgtcaaggcatatgtacagtcataccacctaggtgttgggtccagcgatatgtcacaatccaatctataggctgggcactaggcaagagaatcaaattactcaggtgctggtcagaggtgtatttcacaattacagttgcagtaaatgtagggaaaaattaacaatcctgcacatgacccatttctaggtattagaatcaacaccctttgtaagttgagtttgagtacatcagttacaatctcaatggtggactgaatacatgtataagagtctcaatctttgctgtgaactgtgtccccagtgaagtcaaaacctcactggtatgttgaatcttggtctgagactcatcaacccacatatagactgaatccatgtgtgagagtcaatttttcaacttttggctacctccaggtgtgagaatcacaacttcaacagtgagctgtgttcatgtggaaagatgtcaatctttactgtttgctgggtgtgcgtataagtgtcacaatgtcacctgtgatggacctcattataaaactctctgtaccacctgaggtatttatacaatatgcatgatagtcacaattttctctgagactttttcctagtatggactcataattgtacctgtggaactaagcccatgtatgcgactcaacagctctccaagtagctgggtccagagagagagtgttcacctgcctatgacctgggtttagaaatgagtcaccatgtgaactgtgatggcatgatcacacatgacagtcagaatttttactatggactgcattcacctgtgaaattcaggatctctccagtgggcatcacattctctgtaccatcaaaacactttatacaaaatgtgaaagaatagtaatcctctatgatgttattatctagagaagacccaggaatatacccatttctccaagtttagttacaagtgccagtatctctccttttggctgattcatggtattagtgtcaacatcacaactgtgagcttggctaaggtatatgtcgcaacccaaactgtagaaagaaaacaggagagtagcatcacctgggtgctgggacagaaatatgttacaatttttttagggcaggggccaagcagagagtcatatcacttggttgcctggccagggttatgttacaattctcttccaaaagcaaggcacagaaagcaaagtcacattaattgggtaatggactcagctatatgtcacaattttctctgcagttaagacatgtgtacaagaaaatcaccacctggttgctgaactcagaggcatgccacaatcttctgtgtgggcatggtgcagatggaagaggagagtcacacctccaaagtaatggatgaagagctatgtcacaaggcctcttgtaggcagagcccaagcaagagcctttcacccacttggtttgacccagcaatatgtcttaatacctaaaatacacagggccgatttgaaagatgagagtgataaggcctggcaaaatggctgacacccataagttcaataccttgggaggctgaggtgggcagatttcttgaggtcagcagttcgagaccagcctggccaacatggtgaaaccctgccgttactaaaaatacaaaaattagccagttgtgggtgtgcacacctgtaatcccagctactcaggaggctgaggcaggagaatcacttgaacctgggaggtggagtttgcagtgagccaagatgatgctactgcactgcagcctgggtgacagtgtgagactccatctcaaaaaaaaaaaaaaaaagaaagaaagaaagagggatatcactcgatgctggggccagtgattttacaatcccccctttatacagggctcaagtagaaaaggacagttaaatcacctaggtgataaacaaaatatgtcataatttccttatcagaagggctcatgggggagagtcacatcacctagctgttggacacagccatacttcaatatacacaattttaaatatacataatatacaatttgtatattgaaatatggttgggtccaacacctagctgatgtgactctcctgcataagccctaccaacaggggacatatgacatattattttatttatcacctaagtgatgtaactcttctttctcacctgaaccctgtagaaggagaggagagtcacatcaccaaggtgctgggcccagtgatatatcacaatccctccttgggcagagcccaagcactagaaaagagtaacatcagcttattgctaggtcagtaaaatatgggacaaaactccctaaaaaacaaaaggcccatgcagcagtctacctaatttagagcttcagagatatgtcaaaatgccctatgtgggtgaagttcaggtcaaagagaaatgttatataacctagggccttcacctagttatatgtcacagtcaccccagtgggcaatgctcaggcatggggaaaatgttaagtaggtgctgagacaagtgatctgtcataatccccactgttgacaggtctcagagacaaaaaaaaaaaaaaaaaagtcatatcatctagtttagtgggccagggacattcactatgtcctctgtagacaggtatgagacagaaaaattacatcacctgtatactgtgcctagggactagtcactctcccttctgtggtcagggcccaggtaggagcaaagggtaacatcatgtaggtgcttggcccagatatgttacaacgtcccctatggaaaagcccatgtaaaagtggagagtaacatcaaatagatgatgggtccaggaatgtggcaaaatgtctcctgtagccagggtctaggtaggagattcacatcacatgggtgttagacccagcaatatgttacaacagcccatgtgggcagggcacataaatgacaaacacattacctgggtgcagagaccagtgatatgtcacaatgccctctttggcagcaccaaggcatgagtacagggtcacatcatccacatacttgttccaacaatatgtcccaatcccatctgtgcactggccccaggcaggagagtcaaatcactcaggctatgtgcagagacatgtttgacaatcacacatgcagaaaggctcagggataacatgaataatttttcacatattcccatcctaggtatgagagtcaataccaggccgggcatggtggctcatgcctgtaatcccagcactttgggaggctgaggtgggtggatcacaaggtcaggagttcgagaccatcctggccaacatggtgaaaccctgtctctactaaaaatacaaaaattagctgggcatggttccgtgcactgtagtcccagctactcgggaggctggggcaggagaatcgcttgaacccaggaggtggagcttgcagtgagcctagatcgtgccactgcactccagcctggtgacagagtgagactctgctccaaaaaaaaaaaaaaaaaaaaaaaaaaaaaagagagagtcaagaccatttggaggttgggtctaagtacacaaatcacaatctcaatgtggatggattcctgaataagagcctcaatctctccttcagactgggtcttctcagtaaaatcatagcctcagagttgtgctgaatcttggtctgaattaccagcccagatgtggaccagatccacatacgagagtcaatgttgcaactttccactccctccagggttgagattcagaacttcagaagtaggttgtgtttatctaaaaggatggcgtagttactgctgactggttttgagtaccagtatcacaatgtcaccagtgtgcttggtcatgtaagggcattcaatgtattactgagggctttattgccaggtgtgtcccacagattctggtctatggattaaattagtactcagacacaggtatgcagtgtaagagcagctaagggaatgccaggctttagtagccaaagtgcagccctaagaagctggagccacttgcttttttcagtgcaggcacaataccaaaaacctggagccaacacaagctgcaggtaattaacatttattgttcccctttcagggaatgtcacacacgcaaatgatcaaaggtcagttcctgatcaacataagtaaataagcctgtttaagataaattcttccacactcccttgtacctactgcttgctctctgcctcagggttatagaacagctgccttcagctattctcccctggagctctgcaggaccttccaacatttcagaaaatttgcgttctttccctatcctttttccaccactctgaccaatctcccacatctcccctttttctgtttttttgcatcaggttttgttgattgaagcatacagatctgagcagcgacaggtttgactggtgcaatggttacagtttgtgttccagctttgcaccctagaaccagtaaataacataagacaaacatgagtataatcaatattattcttttccaatcaaggattgatatgtaatgttacttggcacctgagtccaatgtgtgccattactgagggaccccaccgggggtaagtcaatacctcccagccaattggtcacgttgtcagaggctgagaagggggtaccttcccaagtaaaatgccgtaagaaaggcagatctagaagatgggcccaatagtttatagcaggtgtgggttgcaggcaaaaagagagaataagaagaatcagtattctataagagttgcaatgtggaataaaaagcatagcaaagaacaaattatatggattgaatggtatctgtgtctgaagcagatttgttcagcctcctgagttgtgttcttcagcattccccaggtaatgtctggggcctgtgtcatccaaggaagccacatcatccagggttgtgggttctgcatcgtcatttcctttatttctggtagcaggttgggccctagtcatgccgtggtaaggtttgatgcatcatgctggaatccaaagaggacctaaggggctgtgaacacaagcatatcccctttcccacgttagcaaatcatttggaccacaccgtacattactatttacacctttccataaaactgaaggctttctattttgagaggtttttgcaaagtgcttatctatggctcattgaaatgtatcatctaaatttaagaaattaagagtaaataaggcttgtgctagtagtgttgtaaggtccctactcatattcacccttttttgattttaagcgtattcttaagggtggaatgggcacgtttcactatgacctaagttaaatgattgataaattcaacaaatggctcctggggcccttgtcatacatttagaaaagatcactgttgaactccacctttgagaatttggtcccaggccctgtgagtgcactgactctgtgcataggctgggggaaaaatttaattgttgttgtacatttacatagggacccctcccctggagtatagcagctgttatgttttgcctggccaattgattctggttagcttgttgttctcataactcatcatgttatgccctccagaggaggtattgactggcctctgaagttgttttagctagcactaaccagtcccatggggtcatgtggaagttatatgctatggcctcaattaatcctttcataaatgggctagtggctccattttctctaatgctctttcttatttctttataagtcttgaaagcaatgggttcatgtacatgattgccttgttgatcttccatcatcaggcaagccaagagctccccctctaatgctgcttgcctaagacagggtcccataactgtagtgtatcccttgtctttttctcaatttactgggggaggggctcagggaaaatctatgtctcctctgtggcaccttcactcggtaatggcggggctgagagaggaggagatagtaaggtaggtgatgattcttcctcccttcccattttatgctcttctgtgtagagtggggccaaagcagtcctaacttaaggcccataacattaaagaacattaaagatgctactgggactcattgtccttgtgcataatgtcatttaagatttcttcccacttgttcccagagctctaggtctagtgtgccttcttctaggaattattggttacagaaaataacagtttgcattagggcccttaattgagcctttgaaaccgaggcttcactagctttaagcagttgtttcaatacttttatatactgttgctgttgagctgattactgttgtctcatgatgaaaccctaggttgaaaaatcccccaaacttggaaatccccagcgggcatcaattacttactgtgcagtaacttcactttcgtttttgagggttccatcatgatgcatttcattgcttcttacatggggcaccacctgctgggtctgtcccacagatcctggcagacagttgaaatgagtactcagacacaggtatgcagtgtaagagcagctaggggattgcccagctctagtggccagagtgcaatccaaaaaactggagctgcttgcttttattccatgcaagcacaatgctgacaacctggaaccaacacaacctgcaggtaattaacatatattgttcccctttcagagaacgtcatgcagatgatcaaaggtcagttcctggtgaacacaagtaaatatgtaaagaagtctctttaagataaattccctcacactcccttgtatctaccccttctcctctgtctcaggattataaaacagctgccttcagctattctcccctggtgctctgcagtaccttctgacctttcagaaggtttgcatctttccctataatttttccaccactctgactgatcccccacactttatacaatatgcttgtgagtagcaatccactctaaggcatttgtgatggtatggacccatgatagtacatgtggctctaagcccaggaatgagtcaacatctctccaattggctgatccatataggaggtgcctcacctgcctatcacctacatttagaagtgagtcatcatttgtagctttagaaatgagccatttctggctgtatgtttgcacatcactgtcacaattccaactgtggactgcatctgcatatgagatttaggacctcaccagtgggctctgtctatgtagagattacaattgtaatgtgtggcaggatgttcttttaagaaacacaatcttgggctgggcatggtggctcacacctgtaatcccagcactttggggggctgaggcaggtggatcacctaaggggtggagtttgagaccagtgtggccaacatggtgagtgaaacccctaaaaaaattagctgggcttggtggcacgtgcctgtagtgccagctacttgggaggctgaggcaggagaatcacttgaactcaggaggcagaggttgcaatgagccaagattgtgccactgcactctaacctgggtgacagagtgagactctatctccaaaaaataaataaataataaataaaagaaacacaatatcatccgtgtttttgtcacttgatgacactctttgtgccacccaagggctttgtacaatatttgagagagtggcaattctctatgaactcagtgaaaagaaaagacaggatcgtgttcattttcctaacactagctaggagggagtgtaactttttttggggggtgggggaaggagtctcactctgtcacccaggctggaatgcagtggcgtgatatcggctcactgcaacctctgctgcccgggttcaagatattctcctgcctcagccttccaagtaactggtattacaggcacctgccaccatgcctggctaatttttgtatttttagtagagacgaggtttcaccatcttggtcagtctggtctcgaacttctacctcatgatccacccacctcagcctcccaaagtgctgggattacaggtgtgaaccactgcatccagctgagtgtaactcttttattgccttgttcaaggtgtgagaatcatcatagcaattgcgagctggggcaagatatatgtcacaattacactagtgagtagggagtgagcagaagggtcacatcacctgggggtggtctaaaggtatgtcacgatctcttctgagggcaagaaccagacaggagagtcataacacatcacctaggtgcttagccagggatgcattaaaatcaattcctataaggcagacttgggtgctctggctcatgctggcaatctcagcactttgggagaccaaggcaagtggatcacctgccagccaaggcaacatgttggaaccccacctccactaaaaatacaaaaattagcctgttgtggtgatgcatgcctttaatcccagctacttgggaggctaaggcaggagaaccacttgaatccaggaggcagaggttgaaatgagccgagatcacatcactgcactccaacctggatgacagtgtgagattctgtcaaaaaaagaaaggaagaaagaaagaaagagagaaaagatgggcataggccacaagtcacatcacctgggtgctgagcccagtgatatgttacaacgctgtctttgagcaacaccctgagaggtgagacacacacctggtggctgatcccactgacatgctacaatcttttcttcgtgcatcgtacatgtaggtgaggagagtcacatttcataggtggtggatgccaaaatatgtcacacggtacctgtgggcaggacccaggcaggagcctctcatcccctaatgtcagactctgtgatatataacaatatgcaaaatatgcaaggtccagtcaaaagatgagttacatcatctaggtgctgggcccaatgatacgttacatttcctactgtggacaggtccagaaagataaggagacacctatcacttaggccatccagagatatgtcacaatgaccacttgggcaggaaccaagaagaatcaaatcccctgtgtgctgggcccagcaataagtcactctcacttctgttagcatgacccaggcccaaagatatattataatctaaccatggacaaagtgaagataagagaggagagtcacataaaatagttgatggacagaaaactcgcatcatcaggggtagggcccagcaatatgtcacaatgtcttatgtgtgcaggtccaagaaaaaaaaaagtaatatccctttggtgcttagttcagtaatattgtaaatattgtacaatttttcccacaggaaaaactaaaaaataacagaaaaaaatcagctacatgctttgaaaggtcacaattctccctatgagcagagacctggtaacacaagagagtcatatcacctgtgggactggtgccagagatatcttttttttttttttttgagatggagtctcactctgtcacccaggctggagtgcagtggcacgatcttggctcactgtaacctctgtctcctgaattcaagtgattcttctggctcagcctccctagtagctgggactacaggtgcccatcaccatgcccggctgttttttgtatttttttttttttttttttttagtaaagacagggtttcaccatgttgactaggctgggctcaaactcctgaccttgtgatccatcagcctcggcctcccaaagttctgggattacaggcatgagccaccgtacccagccacaaaaaacattttaaaatgcctcctgtagccaaggcccaggcataaaatttacatcacctgagtgttaaactcagcaatatgtcacaatggcccaagtgggcaaattgcaggcagttgagtcacaaattgtcagtgcagggcccagcaatatgtcacaatgtcccctgacaccaaaacctaaaagaagagaagagtcacataagctagttgctgggtgtagcaatatgctacaatttccctgtaagcagggaccagcagaagagagtcacattacctggatgctgggccctgtgatatgtcaaccatctttcctgtaataaagacccaggaagcagaaacacatcatctggttgctggccacagcaatatgccacaactttccgtgtaggaagggtgcaggtaggagagtcacatctcctaggtgaggaatgcagagacatgtcacaatgcccctgtaggaagagcacaggtaggagactcccatcccttaggtgttaagtttagcaatatgtcacaatacccaaatatgcagagcctgaaaaaaagaggagaatcacatcacctagatgctaggccagtgatgtgtcacaatttctctgagcagagaccaggcaggagaaaagagtaacatcaccatggtgatgggcactgagttatgtcacaaggtcccctgtaggcagacccagaaaaaaaagttacatcacctaggtgttaaacccagaaaaatgtaacaatgtctaatgtgatatattgagccccaatatgacacaacatgtaagacacatttgagagagtcacataacttgggtgcaatgttggtagcaagccgtaagcctatcataaataggtcttaaagatactggccataaacaggatttctgcagcaatgtgacatgcttgtgatggctgtcatgcacactgctaaaagttgttggtttactggagcagggcaagggacacctggcccagcctggatggaaaaactgctcaaactgcaaatgatagcaggagcagcctgtgccttgagagcatgtttttgctgcagataatcagccagagcctgtttctctgctcctttctgagaatcctttgtttcccataaggaatgcttttagctaatctataatctataatctatagaagcaatgcttatcactggctttctatcaataaatgtgtgggtcaaactctgttcaaggctctcagctcagaaggctgtgagacccctgatttcccactccacaccctatattctgtgtatgtgtctttaattcctctagcactgctgggttagggtctccacgatcgagctggtcatggcaagcagtgcccaacgtggaggctcaaacccaggtcagtgtgtcaccagagcgacagttggagaacatagaactaagttggaggacacctgagtactctttttttttttttttagggttttcaaaataaaatttttctttttttttttttttacaggtgaattacatttatttatttgccatattgttcctgtttttatcatggtgaattagaagcacaattgtgaaatgatggtttaaggctttttccctcctggacttttcttttttttttttttttaattgatcattcttgggtgtttctcacagagggggatttggcagggtcataggacaatagtggagggaaggtcagcagataaacaagtgaacaaaggtctctggttttcctaggcagaggaccctgctgccttccgcagtgtttgtgtccctgggtacttgagattagggagtggtgatgactcttaacgagcatgctgccttcaagcatctgtttaacaaagcacatcctgcaccgcccttaatccatttaaccctgagtggacacaacacatgtttcagagagcacagggttgggggcaaggtcatagatcaacagcatcccaaggcagaagaatctctcctagcacagaacaaaatggagtctcccatgtccacttctttctacagagacaaagcaacaatctgatttctctatcttttccccacatttcccccttttctattccacaaaaccgccatcgtcatcatggcccgttctcaatgagctgttgggtacacctcccagatagggtggcggctgggcagaggggctcctcacttcccagaaggggcggccgggcggaggcgccccccacctccctcccgatggggcggctggccgggcgggggctgccccccacctccctcccggatggggcagctggccgggcgggggctgcccccccacctccctcccggacggggcggctgccgggcggagacgcttcctacttcccagatggggtggctgccaggcggagaggctcctcacttctcagaaggggcggctgccgggcagaggggctcctcacttctcagatggggcggctgccgggcgaaggagctcctcacttctcagacggggcggccgggcagagatgctcctcacctcccagacggggcggcggggcagaagcactccccacatctcatgatgggcggccgggcagagatgctcctcacttcctagacgggatggcggctgggaggaggcgctcctcacttcccagactgggcagccgggcagaggggctcctcacatcccagatgatgggtggccaggcagagacactcctcacttcccagacggggtggcagccgggcagaggctgcaatctcggcactttgggaggccaaggcaggcggctgggaggtggaggttgtagctagccgagatcactccactgcactccagcctgggcaacactgagcactgagtgaacgggactccatctgcaatcccagcacctcaggaggccgaggctggcagatcactctcggttaggagctggagaccagcccggccaacacagcgaaaccccgtcttcacgaaaaaaatacaaaaaccagtcaggcatggctgcgcgcacctgcaatcgcaggcactcggcaggctgaggcaggagaatcaggcagggaggttgcagtgagcagagatggcagcagtacagtccagcttcggctcggcatcagagggagaccttggaaagagagggagagggagaccgtggggagagggagagggagaccatggggagaggaagagggagagggagccacctgagtactcttaatcaatccccatggtgagtaagaaagggagctcagaagcatcagggtaacaatggacaagtgtgggctctggttcgttccaccttggaacattttcacaataatgatgaggaggaaggaaagtataacaaagtaacagaagaggtaacagagcaggtttgtttgccagctaaagctaaagcctcaaaggaggaagaggttcatccctagccttctgcaccccattattttgaagaaaaagagtggcctgaccctccagatctttcttttcccgaggacactgggcaaaaagtagttgccccagtgactgagcagcaccttgagtgaccgctctcagttctattcaggcaggaatccagcaagctagagagggtgatatggatgcttggcagttctctgttagaatatacccacctgatcaatagggaaatattatggctatgtgtgagccttttccttttaaaatacttaaagaatttaaacaaggtattaatcaatatggaccaggttctacttttgtaatgggactgttaaagagtgttgctgtctccagtcagatgttgccagcagggatggtaggattatttctaggtaggtctagtttaaatttaaaaggagtacaagtacatacaggaatcattgattcagattacaatggggaaattcaaaatgttatatctacttctgttccctggaaagcagagccaggagagtgtatagcacagcttctgattgtgtcatatgtggaaatgggggaaaatgaaactaaacagacaggaggatttggcagaaaaaataaacaagagaaagccacctactgggtaaatcaaattactgataagcatcctacctgtgaaataactattcagggaaagaaatttagaggtttggtagatacaggagtggacatttcaatcatttctctacagcactgaccatccgcacggccaactcaaccctctcaatttaacatagctggagttggtaaagcccctgaagcatatcaaagtaattatattttacattgtgaagaacctgatggacaatctgggactattcagccaattataactctctacctataaatttatgggggagagatttattacagcaatgaggagcagaagttctaattccagaacaattatatagccctcaaagttagcatatgatgcaagaaatggggtatgtacctggcatgggattaagaaaaatttacaagtgttaaagaaactgcttcaagtgggaggacaaaattctcatcagggtttaggatatcatttttgatggtggccattgttaagcctccagaacctataatttcaaaatggttaacaaataagtcaatttggatagaaaaatggccactgagtaaagagaaactggaggctttagagaatttagttaccgaacaattagaaaaaggatgcatagctccaacattttccacctggaattctccagtctttgttattaagaaaaaaatcaggtaaatggagaattaattcagttacacaacctataggaacattacagccaggattgccttctccagctatgattccaaaaaattgtcctttaatagtcatagatttaaaagactgtttctttactctccccttagctgagcaagactgtgaacggtttgcatttacaattcctgtggtaaaccatctgcagcctgctaagcgttttcattggaaagtcttaccacaaggcatgttaaacagtccaacaatttgtcagacttatgtaggacaagcaattgaacctacttgtaaaaaattttcacagtgttacgttattcattatacagacgatatgctttgtgctgccccactcaggaaatattattccaatattatcacttacaaaactcggtttcttgagctggtttaattatagctcctgacaaaattcagactactactccttactcctacttagggaccttagtaaatgacactacagcagtgccacagaaagtaaccatacataaggatcaattaaaaacattgaatgactttcaaaaattactagcagacattaattggatatgacctgctctaggcattcctacctatgccatgagtaatctattttctatccttagaggagatcctaatctcactagccctcggcaattaataaatgagactgagacagagttacagctgactaaaaagcaagtgcataaaactcaaataaatagaatagatccagaaaagactttagacttattgattcttccaactcagcattcacctactggtgttattgttcaagagcaagatcttgtagaatggctttttcttccacatactaattcacagactctatctccttatttggatcaaactgctactctgataggaaatgggaggactcaaatcattaaattgcatggatatgatcctggaaaaattatcgtccctcttacagaggcacaaatacaacaagtctttataaatagtcttaattggcaaaccatttagctgatttcataggtgttcttgatagtcactttccaaagacaaaattattttaatttttaaaattaatgaattagattctccctaaaataactaaatttaaaccaattgaaggtgctggaaatgtttttacagataagtctactaatggtaaagcttcttattctggatcaaaaagtaaagttttctagacaccctatacttcagctcaaaaagtggagcttgtagctgtaattgaggtgctgactgcttttgagatgcctgtcaatgtaatttctgattcttcatatgtggttcattccacacaattaattgaaaatgctcagttatgatttcatacagatgaacaactaatgactgtatttacccaattgcaaacagcagttaggaatagaatgcatcctttttacattactcatattagagctcatacacctcttccaggacctttgactgcagggaatcagatggctaattgcctagttgctactgcaatatctaatgctagacactttcacaatttaacccatgttaatgactctggtctcaaacacaggtacagtattacttggaaagaggataaagccattattcaacaatgtccaacttgccaaatggtgcattctacatcttttacaggagttaatctttgaagattggtacctaattctcttcggcaaatggatgtcactcatgttccttcttttggtaaattggcttatgtacatgtatgtgtagatacattttctcactttatttgggctacatgccaaataagggaatcttctgcctatgttaaatggcatctcctgcaatgcttcacagtcatgggcattccagcttcagttaaaatgcacaatgccccaagctagagcaaagctcaagctacatttttctctatatggaatattaaacacattactggtatctcatataattctcaaggacaagccatagtgaaaagaacgaatctctcattgaaacagctgttgcaaaagcaaaaagggggataaacagggactatgggacacctcatatatacaattgaatctaacattattaaccttaaattttttgagcctgcccaaaggccagatgttatcagcagatgaacagcatctacagaaaccagttgcaatgacagaagcagaacaactggtttggtggagagatctgataacaaaaagttggaaaataggtaaaataataacttggggtagagggtatgcttatgtttctccagcaaccgatttggataccatcaaaacacctgaaaccttaccatgagccagatgctgaggaagagattctgggaggatcccaaggaccccctggttgcagtcatgtcaagactgatgctgaggaggaccccaactatcatgagcaacacccatcaaatacagccacctacctggggacagatcaagaagctgtcacagatggtggaagaaaacctgaggaaagcaggcacggtgagtaatttaatgatagctatgatagcagtgatcaccattgccatgagtattccttcagcaagggctaacacagagaacagttatacttattgggcatatttatcaatcttggctggcaataatgcctggatgtaatcactctatgatgcatttacacgtgctttctggtctcagcatttaccataataaatctgctcctataactgaggcataccaccctcaaaaacctatttgtaaacagaattaaacctgaccagaagaaatgaacatacttgtttgggaagattgcattgcagaacaggcagaggtgatgcgcaacgattcctatggaatcattattgattagtcctctaaggggacgtttagcttgaattgcacctctcagtctgtgtgccatggccacactatgttcagctggtctgaacaaaatggtcagatggtagaaatggtaagaagtgcggcaagagttcctattatctggaaacatggcagtatagtggcacctcaacctcaaatgatatggctcactctgggagctaaacataaggatttgtggaaactattaacagctcttaataagatcaagatttgggaaggaaaatatactatgccatcagaatataatcctaattacattttagaactttttgaaaacaatacaatgtgaatacaaagttgtgttcaccctccttttctgttggtaatgggtgatctaaagtttgacatctctaattatcatgtaacttaccaggaatgtagattgttctcttgtgtgaactcttccttgtttagtactattcattctatcctagtagtgagagctcaagaaggagtatggttaccagtgaagctttcccatccttaggaagcctctctctctctccatattactgaaattcttcagaaaattctgagatgctctcagtgtttcattgttactttaatcttgattattataagactgatcactgtcacagctactgctgcagcagctggagttgcactacattcatcagtgcaaacagcagattttgtaaataaatggcaaaagaattctactctgctgtggaactctcaaactaaaatagaccaaaagatagttaatcaaatcaatgatctctgacatactgtaatgtggctaagagatcaaatagctagtttagaatatagaatgcagctaaaatgcgactggaataattctgacttttgtatcactcctcacccttgtaatgaatcagagcatgagtgggaaagaattaagaaacatttaaaaggtcatactggaaatttatctttgaatattgcaaaactgaaggaacaagtatttcaagcttctcaggcacatctgatgctaataccaggaactaaagtgcttgaaggagctgtggacaggttagcagctattagcccattaaaatggaatgggtgggaattgaacaatgggaacacatggacacaggaaggggaatatcacacactggcgccagttgtggggtggggggaggggggagagatagcattaggagacatacctaatgttaaatgatgagttaatgggtgcagcacaccaacatgccacatgtatacatatgtaactaacctgcatgttgtgcacatgtacactaaaacttaaagtataataataataaaaaagaaacttggaagttctgtgatttcaatgatgattgtgcttttaatctgtgttgtctttgtatagtctgtagatgtggatcccgaatcctgcaagaagtagccctccatgacaaagctgcctatgcctttattgctttgcagaaacataaagggggacttgttggttgcaagccctaagcctatcataaacaggccttaaagaaactggccataaacaggatttctgcagcaatgtgacatgctcatgatggctgtcatgcacactgctaaaagttgttggtttactggagcagggcaaggaacacctggccctgcccagagcaaaaaaccacccaaaccacaaatgatagcagagtggcctgtgctttgacagcatgtttttgctgcagataatcagccagagcctgtttctctgctgcttgctgagaatgctttgtttcccataaggaatgcttttagctaatcttgcttatcactggctttctgtcaataaatgtgcggttcaaactctgtttgagactcagctctgaaacctgggagacccctgatttcccattccacaccctctatttctgtgtgtgtgtctttaattcctctagtgctgggttagggtctccatgaccgagctggtctcaacaggtgcaggattcagcaacaattgacaatacccaaaatttgtggggtccccccaaaaagaggagagtcaaatcactgaggtgctggatacagtgatatatcacaatcttacctttggactgggcccagacagcaacatcaaaccactcaggtgctgaacataggcatatgtaacaatcatacccgcaggaaattccagtaatgaattaacaatcctgcacaggtcccagttctaggtatgagagtcaccacattttctatgttgggtctaagtatggtagtgaaaatctcaccaatgaattggattggtgcatgagagctttcattcctcctgtaaactgtgttcactctggccctaagcccagataaaattttcacagattcagatagaattcccacatgccaatgaactgggtttagaaataagtcatcattccaactttggctggatgttcacatatgacagttacaattttaactgtggactgtgtctgtgtgaaattcagggtctcaccagtggtctccatccatgtgtgagggtgacaatcctaacaattggtggggtgtacacatgagagccacaatttcacctgtgtgctgaaccctggaatgacactctctgtactacaagaaatttatatagtatgcaagaaagtgacaattctctatgactttatacaaaaaaaagaagacccaggatcataactacaacactaggcctagctataaaagacagcatctctcctactagatggtttgaggtacgagaatcaccattgcatctgtgagctaggccaaaatatattttacaatcccatctgtgaatagacagagagaaggagagtcacatcacctaggtttttggccaggaatacatcacaatctttactgagggcagggaccaaacaggagtatcacatcactttaatactcagccaggaatatgttgcaaccttctcctaaaagtaggacacaggcagcagagtcacatcacctgggtgctgagttcagcaacaggtaacaatgctttatatggtcaagacccatgcaggagagacacatcacctggcacctgggcctagtgataattcacaatttttcctgtgtgcagagtgcaggcaaaaatggagagtcacatctcataggtgactgatgcatagatatgtcagaagccccactgtagaaagggtccaggcagaagcctcttattttataggtgttggatctagtaatatgtcctaacatggaaaatattcagggcttaggcaaaaaaaaagggcggggtcacataacccgagtgcagaacttagcaaaatgtaacaatgcaccatgtgggcagtgccaagggaagaaaaaagactcacatcacctgggtggacggcccaggcatatgtcacaatgacacttgtgggcaacaccaaggctggaaaagagggtcacatctttgaggtgaagagtcaagatatatgtcacaagctcatctgtgggctgggccaaggcaggagagtcaaatcactaaaatgcatagcagacacaatcatacctgaaagtccaggaataagattagaaattccatacatgtccatgttctagatatgagagtcaacacctcctgtaatgttgggtctaaatacatgagtaacaatctcaatagctgacaaaatttttgcaagagagccacaatttcttctgcagactgtgttctctcagtgtaggcacagcctcatatgtgtgctgaagtttggtcagagtcaccagcccacctgtggaccagatccacatatgagagtcaattctccaactttcaacagactccatgtgtgagctccagaacctcaacagtgagatatgcttatgtgggagaatgacaatctttattgttgcctgagtgtgcattcaagagacactatctcacctgtgtgctgtgcactcctatgacactctgtgtcacctgagggctttatacaatatgcaagagtggtgatcctctgtgatcttcaaacaagaaggaaatccagattcttttcattggttctaagcccagagtcaacatccctctaattggctaagtccagataagagtcctcaccttcctatgagctgggtttagaaatgagtcaccatcagctgggcatgatgggtcatgcctgtaatcccagcaatttaggaggctgaggcagttggatcacctgaggtcacaagtttgagaacagcctgaccaacatggtgaaagctcatctctactaaaaatataaacaatgatctggacgtggtggcaggtgcctgtaatcccagctacttgggaggctgaggaaggagagtcgcttgaagccaggaggcagaggttgtagtgagctgagatcacaccattgcactccagcctgggcaacaagagggaaactccatctcaaaaaaaaaaaaagtcaccatctcaactgtggccagatgttcacatatgacagtcagagttccaactgtgaaatggattcatgtgagattcaggacctcaccagtgagctctgtccatgtgtgagggtgacaattctaaaggtgggtggggtgtgcataggagaaacacaatctcatctgcataccggaccctgttatgacattctctataacacactagggctttacagatgtgagagagtggtaattctctatgacttttatacagaaagaagacccaggatcatctttgttttcctaagcatagctatgagcaacatgatctctcctactggcttcttcgaggtatgaaagtcctcagtacatctgtgtgcttggccaagttatatgtcacaattccacctgtgggtaaagaacaagcactagagtcacatcaactgtgtgctgggccagggttatgtcacaatcttccctgagagcatgcaccagacaggagagtcatatcacagggttctcaaccagagatgttacaatcctctcctgaaagtagggcacaggaagaagagtaagatcacctggatggtgggccaggagatatgttacaaggatcgctgtgggcaaggcccagaaaggacagacaaaacacctggttgctgggcctgtcaatatgtcacagtcatctctatggcagaatgcaggcagaagtaaaggatttcatctcccaggtgatggttaaaaaaatacatcccaaagcactctgtgggaaggcctcaggcagaagccttccaactcctaggtgtttgtttcagtgatatgtcacaataaccaaaatatgcaggtctcaggcaagtgaggagggtcacaccacctaggtgctaggtcaagtgatctgttacaatcttttttttttttttttggcaatgctcaagcagaatagaaaagtcacatcaccaagataatgaacaaaaacatgtgttagaatatttctgtgtgagagcccatgcaggaaagtcacatcaccatgttgttggatccagagataacgttgtaatacatgatgcatgtgggtctcaggcaggagaggagagtaacatcacttaggtgcagggtgcacctaaattcacatcacaatttccccttaagcacaccccaagcagtagcagagagtcacatcacctaggttcttggtccagcagtatttcacaatacccctgaggggatggcctaggcaaacaagtcacattacctaggtgagaagcctagagatatgtcacaatgtcccttgtgggtaggtctcaaaaacaagagaagagacatagcctaggtgctgggctcagctttatgttccaatcaccccagttggaagaagccaagaatgaagaggagtcacatcacataggaattatgtcaagtggcatatcacaattcccactgtggacaaaccccagaagaaaggagtcacattatctaggtgggaggcccaaacatatgtcacagtgactcctgtgtgcagggaccaggcagaataatacaccactgttttacttgtcccagcaataagtccctctctattctgtggacatggccaaggcaggagaggaatgtcacctcacataggtaaaaagggcatctacctgagcttggtctataggagagattgtaatgggtcaagaaatatgtcacaatgctctctgtggtaagggttcaggcagaggactcacatcatcttagtactgggcccagtagtatgtcccaatgccttctaagggaacagccaaagcaaaaaaagtaatatcaccttactgttaggcacagtcgtatctcataatctcttttgtgagcagaaacttaaaaaaagaaaagtgtcagccgggcgcaatgggtcatgcctgtaatcccagcactttgagaggctgaggcaggtagatcacctgaggttgggagttcgagacaagcctgaccaacatggagaaaccatgtctactagaaatacaaaattatttgggcatggtggcacatgcctttaatcctagctactcgggaggctgaagtaggagaatcacttgaacctgggaggcagaggttgtagtgagctgagatcactccattgcactccagcctgagcaagaagagtgaaactccgtcaaaaagaagaagaaaaaaggaaagaaaagtgtcatatcagctaggtgctgggcccaacaatatgtcccaatacccccagtcattggggaacaggcaggaaaaataagtcacatttccagggtgattggaaagatgtatcttacaatgccctctgtagaaaggtccaggatgaagcattacctcacctggctgatggacttagcaatatgtcacaatggcctatgtaggtagggcacaagcatgagagtcacataatcaaagtgtgagacccagcaatatgtcacaataaacatgtgggcagcaccaaggccaaagaggagactcacatcacctgggtgcaaggttcagcaatatgtcacaatgacccctgtgggctttacaaggcagaatagagtctggttccagggatatatcactgcgagctgggcccagggaagagagtcaaaccattcagatgctgggctgaggtgtatgtcacaatcacacctgtaggaaggtcctgtgatgacattaacaataacacacatgtcccgagtgaagggatgagagtcaacacctcctccattttgggtctaaatacaggagtcagtctcaatggtggactgggtttgtgcatgagcctcaatttctcttgcaaactctgtgccttaaagttacagccacaaaggtgcactgaatcttggttaaagagtcaccaacccaactatggaaagaatccgagagtccattttccaacattcaactgcctccaaaagtaacattcagaacctcaaaagtgggttgtgttcatttaagtagatgacaatctttgctattaactgggtgtgaatatgactgtcgcaatctcacctgtgtgctcagccttgccagtacactctttttaccacctgggtgctttatatggtatgcaggagagttgcaatctgctctgagacctttgtacttctgtggattcttaatcttatgtggtcctaagtctaactatgagagtcaacatctctcatattgccagggtccagacaggagagtcctcacttgccaatgagctgggtttagaaatgagccagcatctcacctgggcatggtggcttacacctgtaatcccaacagtttgggaggctgaggcaggcggatcacctgaggtcgtgagttcaagaccaacctgaccaacatggagaaatactaaaaatacaaaaaaaaaaattatccaggtgtggtggcactgcccgtaatcccacctacttgggaggctgagacaggagaattgcttgaatgcgggaggcggaggttgcagtgagcagagatcacaccattgcactccagcctggacaacaagagggaaactccatgttaaaaaaaaaaaaaaaaaaaaagggtcagcatctcaactggccagatgttcagatatgatagttacaatttcaactgtggactggatctgcatgtgagaatcatgacctcatcagtgggctctgtctatgtatgagggtgacaattctaaaaataggcagaatgtgcttacaagaaacataatatttaggccaggcatggtggctcatgcctgtaatcccaacactttgtgaggccaaggtggacagatcatgaagtcaggagatcaagaccaacctggctaacatggtgaaaccacatctctactgaaaatataaaatattagccatgcatggtggcacgtgcttgtagttccagctactcaggaggctgagccaggagaattgcttgaacccgtgaggtggaggttgcagtgagctgagatttcaccactgcactccagcttgggtgacacagcgagactctgtctcaaaaaaagaaaaaaacatgatccaacctgctttgcagccctaaccaggactgaggcaggagcctcccattttaggagtctggctcagtaaaatgtcacagtaccaaatatgcagttctcaggcggaacagaagagtcacatgacctaagttcttgttccagtgatatgtcccaatcttgccttttggcagggaccagggagaagagagcagtcacatcacataggtgatgaatgaacatatatgtcctaatacccccatgtacagagaaaatgcaggacagttgcatcagctatttgctgaacccagtgatatgtcaaaatatgcaatttatgcagggcccaggcaggagaagagagtatcatcacctaggtgtcaggcacagtgacacattacaatatcttcttgagagtctaagcagtggagaagagcgacatcacctaggtgccgagtcaaaaaatatgtcagtcaggcatagtggctcatgcctgtaatcccagcactttgggaggtggaggcaggtagataacctgaggtcaggagttagagatcagcctggccaacatggtaaaaccctatctctaactaaaactatgtgggggttcagtcaggatggtgggagaaattgtaaaattataggaaataaagacaaacccttgtggaaggcctggggatttgcataaactgtttggctgaaggcagctgaattctcctaaaagttcagggcatagatacataggaatgtagactagtttacctaaataacttattcacaaatgtggttctaaaactaacctttgatagctcgtgggcaggatggctcttttagaggggaaggcgaccaggttgattaccctctattagtgttgactcaaagcgtttgtcatttaatgtgtgctgaataaatgccagcagggccagtgagtcagggccatggctgcaactctttacagccctctccttggagtctgtaagtggcccggaccctcagccgatctgagaagcacaatatctgtgtcagtgtacattattcatctgtcattgtgtcagggtctgcaggacaaacccctgcagctggtgccccatgtgaggaatgctgtgcagggagcacgacggacccccaaacaatggtaaaaaaggaactgcacagtcagtgagtaatcggtaagtcattggtgcccacatgagatttccaagtttggcggggattgttcaggctgaggtttcatcatgggacaacagttaccagctcagcggaaatagtatataaaagcattgaaatagctgcttaaagctagtggagcctcagttttgaaggctcaattaagggacctaatgcaaactgttgcaacccataacccacggttcccaaaagaaggcatgctggacatagagctctgggaacaagtggggagaaatcttaagcaacaccatgtgcaagggtaacgcatcccagtatcatctttaatattatgggctctagtgagggtggccttggtcccattatacacagaagagcctaaaaaggggaaaaaggaggaatcatcacctgccttaccacctccttctccctcagccccaaaataacaaagaagaaacagaggttttacctaagcctcctcctcaaataaataggaaaaaagatgagggatacactacagcaatgcaaccctgtcttaagcaagtagcattagaacgggagctattagcctgcccagtaatgtaaaatcaatgaggaaaccagttacataaagagttgagagaccaggcacggtggctcacccctgtaatcccagcattttgggaggctaaggcaggcagaacatgaggtcaagggatcgagaccatcctggccgacatgatgaaaccctgtctctactaaaaatacaaaaattagctgggagtggtggcacacgcctgtaatcccagccactcaggaggctgaggcaggagaatcacttgaaaacccgggaggcagaagttgctgtgaaccaagtttgcaccattgcacttcgacctggcccagcctggtgacagagcaagactctgtctcaaaaaaaaaaaaaaaaaaagagttgagaaaaggcattagaggccacagctgtgcagccaagcaggcagcgggcagaagaaaaggtttggcagcagggaagctcacagacatggtgccagcaaatgctcccaaaaacagcctgtgtggtgtcgaggatggggagccaggcccagcatgccagacctagcctgctaaggaggggtggaaggcgtgcacgggaaggtctgccaagccagcagcagcctggtggtgggggaagggagcagcacaagcgaaaagtggcacaggcaaaaagtggcgcctaggcaagtgcaacatgacagccaccccaggacccgcgctgctgccctccaactccacgggcagcccacagcaaaatttcatgtgttccttgtatacaagctatcaggcctctgagcccaagcctgcaagtacacatccagatggcctgaagcaactaaagaaccacaaaagaagtgaaaataattcctgccttaactgatgacattccaccattgtgatttattcctgccccaccctaactggtcaattgaccttgtgaaattccttctcctggacaatgagtctcacaacctccccactaagcaccttgtaacccccatctctgcctgcaagagaaaaactccccttgactgtaattttccactacttgccctaatcctataaaactgccccactcctatctccctttgctgactcctttttcggactcagtctgcctgcacccatgtgattaaaaagctttattgctcacacaaagcctgtttggttatctcttcacacagacatgcgtgacatttggtgctgaagacccgggatgggggactccttcgggagactggtcccctgtcctcaccctcactccatgaggagatccacctacaacctcgggtcctcagtccaaccagcctaaggaacatctcaccaatttcaaatcaggtaagcggtcttttcactttcttctccagcctctcttactacccttcaatctccttgtccttccaattccagttctttttcatctctagtagagacaaaggagacacattttatccatgaacccaaaactctggcaccagtcatggactcaggaagacagtcttcccttagtgtctgatcatcatggggatgcctgccctgattattcacccacattccattggtgtctgatcatcgtagggatgcctgtcctgatcacccacattccattggtgtctgatcaccgcagggatgcctgccttggtcattcacccacattcccttgctggcaagacaattgtggggatgcctgctttggctgctcacccatgttacagcccagggctgctcaccccacacccttctccacatctctacccttctcttcaaacttcactatgggttaccttccaccctccattcccccttcttctcccttagcctgtgttctcaagaacttaaaaccttttcaactcacacctgacctaaaacctaaatgccttattttcttctgcaacactgcctggccccaatacaaacttgacaatggttccaaatggccagaaaatggcacttttgatttctccatcttacaagacctggatgacttttgtcaaaaatgggcaaatggtctgaggttctagacatccaggcattcttttacacatcggtccctccctagtctctgctcccaatgtgactcatcccaaatctttcttctttctctcctgtctgttccttcagtctccaccccaagttctgagtcctttaaatcttccttttctaaggacccatctgacctctcttctcctccccaggctgctgctcaccaggatgagccaggtcccagttcttcctcagcctctgttccccgaccctataatccttctatgacctccccttctcacacttggtccagcttacaactttgttccacaactagctctcccccacctgcccaaaaatttcctcttaaagaggtggctggagctaaaggcatagtcaaggttaatgctcctttttctttatccgacctctcccaaatcagttagcatttaggctcttttacatcaaatataaaaacccagcccagttcatggcccgtttggcaacaactcttagatgctttactgccctagacccagagaggccagaaggccgtcttattctcaatatgcattttattacccaatccactcctgacattaaaaaaagccccaaaaattagattccagctgtaaaaccccacaacaggacttaattaacctcaccttcaaggtgtacagtaatagagaagaggcagccaagcggcaatgtatttctgagttgcaattacttgcctctgctgtgagagaaaccccagctacatctccagcacacaagaacttcaaaactcctaaactgcaggggccaggtgttcctccaggacctcctccccaggatcttgcttcaattgccagaaatccggccactgggccagggaatgcccgcagtccaggattcctcctaagccgtgtcccatctgtgcaggaccccactggaagttggactgtccaactcacctggcagccactcctagagcccctagaattctagcccaaagctctctgactgactccttcccagatcttggcttagtggctgaagactgatgctgcccaattacctcggaagcctcctggaccatcacagatactttgagtaatctcttatagtggaaggtaagtccatccccttcttaatcaatatggaggctacccactccacattcaagagtctgtttcctttgcctccgtaactgttgtgggtattgatggccaggcttctaaacctctttaaactccccaaatcttgtaccaacttggacattcttttatacactcttttttagttatccccacctgcccagctcccttattaggttgagacattttaactaaattttctgcttccatgactattcctgggctacagccacacctcattgccccccttttccccagttcaaagccttctttgcattctccccttgtgtctccctaccttaatccacaagtatgggatacctgtactccctcctttgtgatcgatcatgcaccccttaccatcccattaaaacctaattacccttaccccactcaatgccagtatcccatcccacaataggctttaaggggactaaagcctgttatcactcgcctgttagagcatggccttttaaagcctacaaactctccttacaactctcctatcctacctttccaaaaaccagacaagtcttacagtctcgtccaggatccgcatcttatcaaccaaattttcttgcctatccaccccatggtgccaaacccatatactctcctatcctcatttcctccctccacaacccattattctgttctgtatctcaaagatgctttctttactattccttcacacccttcatcccagcctctttttgctttctcttggactgacccttacactcatcagtctcagcaactcacctggactgttcgccccaagggttcaaggagagcccacactactttggccaggccctttctcattatctgctttctgtttgctcatctgccttccaccttattcaatattttcatgatcttctttgtagcccctcttaccaatcttcccagcaggacactatcctgcttcttcaacatctctactcaaagggatacagagtatccccctccaagacacaaatttcttcccctagcattacctatctcagtataatcttccattgacatacacgtgccttcccgtagaccaggttcagttaatctcccagaccccaatccccaccaccacacaactcctttccttcttaagcattgttggttatttctgactctagataccaggttttgctatcctaaccaaaccactttacaaactcacaaagggtaacttaactgatcccacagaccataagtcttttccccattcttcttttcactctctcaaaaaggccctggaggcagctcctacactagcactccccgacttatcccatcctttttccttacacacagctgaaatacaaggctgtgctgctggagtcctcacacaggagccaggcccatgacctgttgcctttctatcaaaacaacttgacctcacaattctggggtagccctcatgtctatgtgcagaagctgccactgctttaatacttttaggcaccctcaaaatcacaagctatgctccacttactctctacagttcccatagctttcaaaatctatttccccctttcctgttccccacccagaccacacttggtttactgatggtagttcttccaggtccaattgccaatcaccggcaaaggcaggttatgctatagtgtcttccacatctatcattgaggctacagccctgcccccttccactacctctcaacaagcagaactcattgccttaacttaagccctcattcttgcaaagggactagctgtcaatatctatactgattccaagtatgccttccacatcctttaccaccatgctgttatatgggcagaaagaagtttcctcactacacaggggtcctccatcattaacacctccttaataaaaactcttcttaaagctgctctacttccaaggaagctagggtagttcactgcaagggccatcaaaaggcatcagatcccattgctcagggcaacgcttatgctgataaggtagctaaagaagcagttagcattccaactttggtccctcatggtcagtttttctcgttctcatcttttcactttacatttccagttatgccttacaaaggtcccttcttcctctgtggctcctccacctacatgtgtctacctattaattggacaggcacatgtacactagtttcctttactcccaaaaatcatttcacaaataggactgaacagcttcctgttcccctcatgacaccaacacttcaccactattttgttttatttttcttattagtataagaagacagaaataggccttgaattactgctgaaaaaggaggactctaaatttttaaatgaagggtgttgttttgacctaaatcaatctggcctggtataggacagcataaaaaaatcacaaggattgagccccaaaactcaccaaccaagcaaataattacactgaaccccttgggcactctctatttggatatcctgggtcctccccaattcttagtcctttaatacctgtttttctccttctcttatttggaccttgtgtcttctgtttagtttctcaactcatacaaaactacatcaaggccatcaccaatcattctatatgacaaatgctccttctaacaaccccacaatataaccccttgccccaaaatctttcttcagtttgacctctcccactctaggttcccacgccacccctaataccacttgaagcagccctgagaaacatcacccattatctctccataccatcccccaaaattttcaccaccccaacacttcaccactattttgtttgttttccttattaatataagaagacaggaatgtcaggattctgagcccaaccctgcacatacgtatacatccagatggcctgaagcaactaaaaaaccacaaaagaagtaaaaatagccaattcctgccttaactgatgacatcccaccattgtaatttgttcctgccccaccctaactggtcaattgaccttgtgaaattccttctcctggacaatgagtctcagaacctccccacagagcaccttgtaacccctgccctgcctgcaagagaaaaaccccctttgactgtaattttccactacctacccaaagcctataaaattgccccacccctatctccctttgctgactcctttttcagactcagtctgcctgcctccaggtgattaaaaagctttattgctcacacaaagcctgtttggtcatctcttcacacggacatgcatgacacaactgatatcccagattataattctgtgctaagatttaagtaaaatttaagaatttaaaagacctctttctaataatggccactgtttttatctctctcttacccctaatgtgactctctccatttccaatttaagtaaagcagtagcctctgaaggtagagaaattacaaatggctcatgaattacttgaaaagcaagtaaaagctgggcatgtagaaccatctaatagtccttagaattcacccatttttgtcatccccaaaaagtcaggtaaatggaggcttttacatgacctacatgctattaatgccaacttgcaacctatgggaccccttcagcaggggttcccttccccatggcagttcctcaagattggcctataatcattattgacttaaaagactgtttttatatgattcccctagcagaacaggacaaagaaaaatttgtgtttacaataccagctatcaataatgaaaggccagcttgtcaattttattggaaagtgcctcctcaaggaatgctaaacagtcctaccatgtgccagtatcctgtaaataaagctttgctccccagtataaaagaatttcctgattgcaagattattcatttgatggatgatatattactaacagtcccaatggagctgctacttttaaatttatttacctctatcataaagaatacagttaagaggtttactcatagcacctgaaaaagtacaaatgtcctctccttggaaacatcttgggtacatactaacttccaagtcagtaagacctcaaaaagttaaactaaatactagcaacttacatacagtaaatgattatcagaacttactggtcaatattaactgactctaccccactttggggattcctactgataagttacaaaacctgttttctatcttaacgggcaatacagccctagattatcccagaaatttaacccctgcagcaaacaggggaaattgaggaaatagaacaatccatctctcagaggcagctagattgcatatatccaggctactcaattcagtaaaacactcccctagagggttaataggagagataaccccagaactgtgcttcctagatagtttttttgctcatatactgggactaaaacactctttccctatatccaattactcagtaaagtcatctattcaggccacaaacgatgcagtcagttgctagattatgatcctgatatcatcaggattcctttaagtaaaaggcaattcaaagcagtattgccagtatctatcgatctgcaaatagctctctctgattacccaggacatatagagcatgtccttcctgctaataaactccttcatttcttatcttgtactcctgtgattttgcctacaaaaatagttcacttccccatacctaatgctttaacactgtttactgacggttcaggtaaacatggaaaagtggcagtgtggtggagaccataaaattcactcactcaatctgggtttactttcactcagagagctgatattggggccctgatattggccttggaaactttttccactcagctcatcaatattgtgagtgactctgcttactctgtttacttattgcagaatcttgagacaaccttaattaagtccactctaaagtctgccctgtgtgctctttttctctgacttcagcaattgctagatcaatgtacacatcctatttttatgggcacacattcgatcccacagctcactgccttgcccattaacttatggcaattatcaagcagaccttcctgttataacatcactgcttaaccaagccagcaaatcacatcaattcttccaccaaaattagaaaaacttatctaaacaatttcaacttacccagaggctggctaaacaaattatcctgcaatgctcagcttgccagcttacaggcatgtcccctccttcaacaggtctaattagtgcacacgcccttcccggaaagtccactcaatatgtcattaaacatcttttaacttttgtgtttatggggtggcccacaacaattaaaactgataatggtccagcttatgccagctcacaatttcaacagttttgccacacgtggaatatccaacatttcacaggcatcccatataatccccaaggacaagccatagtagaatgtgcccattccactcttaaaaatatgctcaaaaaacaaaaaagagggagtatgggtaaagaccctggaacactattggcacaagccttattgacccttaattttctaaatttagatgataaatttcaatcagctgtagaaaagcactttgctaaaacctctcaagacataaaacctgcagtttttgttaacgtggggaagaggatatgcttgtgttcataccccctcaggtcctctttggattccagcacgatgcatcaaaccataccatggcatgcctaggacccaaccccatatcagaaatgaagaaactgaccttacagtacccgcagccctgaacaaagcagcttccacagatgacacaagccccggacctgggggatgctgaagaggacaactcaggaggctgaacgaatcctgctctggacactgacaccaattactccaggaaattttttccttgctatgctttctgtgtatattgcaactcacatagggtattgatcctttttgtactcttgctttgctggccacctgtacctgctacactctattaggctcatacttgaacccacctttcttttgccctgtcacctggggagacatccccttcccagcctttaataatgtaactgctggccgggcgcggtggctcacgcctgtaatcccagcactttgggaggccgaggcgggcggatcacgaggtcaggagatcgagaccatcctggctaacacggtgaaaccccgtctctactaaaaatacaaaaaattagccgggcgtggtagcgggcgcctgtagtcccagctactcgggaggctgaggcaggcgaatggcgtgaacccgggaggcggagcttgcagtgagccgagatcgcgccactgcactccagcctgggcgacagagcgagactccgtctcaaaaaaaaaaaaaaaataaataaaataatgtaactgcttggctaagagggatagatttactcctagtagggctccatagtaacagcacacatagaactgaagtgtcaaataacactacaggtcactctttgactggaaaaaaatgttgctaattatactcatgattgtcttatgttatttgctaattctaggatgcaaagttggaataagagcaatgaccacctctcctgagagacctgtttgttcccacatctgtactcttcagtcaacagaacctgatgcaaagaacagaaaaggggaagatgtgggggattcagtcaggatggtgggagaaattgtaaaattataggaaataatcacaaacacttgtggaaggcctgggggtttgcataaaatgttgggctgaaggcagctgaattctcttaaaagcttagggcatagatacacagaaatgtagtttatctaaatgacttgtttacttatgtggtcctaaaactaacctttgatagtttatgggcaggatagctctctcagggtagggggagggcaaccagattgattacccactgatggtgttgactcaaagccttcgtcatttaatatgtgctgaataaatgccagcagggccagtgagtcagggccacagctgcaactctttacagcactctcctttgagtctgtaagtggcctagaccctcagccggtctgacaagcataatatctgtgttagtgtacattattcatccatcgttgggtcagggtctgcaggacagacccctagaaaaataaaataaaattaaaaatagccgggtgtggttacacacacctgtaatcccacctacctgggaggctgagatagaatcgcttgaacacaggaggcagaatttgcagtgagccgagatcatgccactgcactccagcctgcgcaatagattgagactctatctctatatatatatatgtgtgtgtgtgtgtacgtgtgtcacaggagagtcacgtaacctagaagctgggtaaacctatatgacataatcatccttgtggacagggtacaagaagaaagtcacatcacataaatccttcaccaagagtcacaccatttaggtgatgggaccagagatgtgtcacaatagtccatgtaagcagagatcatgcagaaggaagaaatcacctgtgtgttgggtgtagcaataagtcactctattttctgtgggcatggcccagacagaaggggagagtcacatcatctaggtgcttggcccagagatacgtcacaatctctactatgggcaaagccaaggtaagaaaggagagccacatcaaattgttgataggccaagaaatatgccacaatgccccaagtaggcagggtctgagcaggagacaaatgacattcatgttgggcactgcaatatgtcacaatgtcttttgagggcaggccaggcaaaataaccttggtgttgggcccagcaatacgtcagttttcttgcagaagagaagaatcacatcagctcagtgctgaaaccagcaatacatatcgttatcccccagtgagcagggatcagtccagtgaaaagattcacatcacctatgtgatccacacagaaatgcatcacaatttccctagaaggcagtgccctggaagaacggttacatcacgtgggtattgaaagcagctatacttcacaatggtctatgtaggcaggccataggtggcaaagacccatcacctgggtgctgagtccaaggatatgtcagaattttcctgagagaaaggctcaggtgggagagaaacaccttctaattgctgggcccagtgatatgtcacaatcttctctgtgggaagaatgcagataaaagaggagagtcacacctttctaggtaatgaagacagagacatgccatcaagcctcctgtgggcaaggcacaggcagaagcctctcatcccctaggtgttgggcccagagatatatcacaatactcacaatatgccatgccctggcaatagaggtaagtcacattacctaggtgctgggtccagagatatgtcacaatccctattttgtcaaggcccaggcataaatggagagtcacatcacctgagtgaaaaatgaaaagatatgtcatcatacccttgtgggctaagcccatgcgggagggtcacttcacgtaggtgctggccccagtgatgtgtcacaatacataatgtatgcagggccaaggcaacagaagagtaacattacctaggatactagcccagtgatatatcaaaatctttttctgtcagtagagagtcacataacctaggttcttagtccagcaatatggcatagtaccccttgaggggagggcctaggcaggagagtcacatcacttaggttagcagccaagagacatgtcacaatgtccactgtgggaagggttcaagaaaagaggagagtaacataacctagcggctaggctatgtgtgataatcacctcaggtgatccacccgcttcggcctcccacaatcctgggattacaggcatgagccttctgccttgttttagatggagcctcactttgtcacccaggctggagtgcagtggcatggtctcagctcactgcaaactctgcctcccagattcaagcaattctcctgcctcagcctcccgagtagctgggactacaggcacgtgccaccatgcccagctaattttttgtatttttagtggagacagggtttcactgttttagccaggatgctctcaatctccagacctcatggtccgcccaccttggcctcccaaagtgttgggattataggcgtgagccaccttgccaggcctgcccttcttttaagaagaaactgtggctggtcacagtggcttatgcctgtaatcccagcactttgaaaggctgaggcgggcagatcacctgaggtcaggagttcgagaccagcctggccaacatggtgaaaccccatctctactaaaaatacaaaaaattagctgggtgtgatggtgcaggcctgtaatctcagctactttggaagctgtgacaggagaatcacttgaacccaggaagcggaggtagcagtgagctgagatcacgcaactgcactccagcctgggcaacaagagcaaaactccatctccccccacccccaaaaaacagaaaagaaaaagaaaaagaaaagaaagaaggacagaggcagtagagtcacgtcacgtgggtgccgggctcagtgatatgtcacaatgctccctgtgagcaaagcccaggcaggagaaacacatcacctgatttctgggctgaaaaatatgtcacaatctcttctttatataagcaaagccttggcatagcaagagagtcacaacaaatagttgattttcccaaaggtatttcacaatgctctgttgtcagggttctgacaggagaccctcatcaccttgttattgggcccagaaatatgtcacaatgccttttgaggtctaggccaaggcagaacagtaatttcacattggtgctgagccccacagtatgtcccaatctcttatccaagcaaaacttatgatgaaaagaagagtcaccctgttggtagtgggccaagtgatatgtcacaatccctagtttttggagaaaccaggcagaagacagtcacatcacctgggtgatggatggaaagatatgtcactatgccccttgatggcagaacccaggcagtagagttaaattaccagggtgtttgacccagcagtgttttacaattgcttatgtggcaaggcacagcaaggtgtcacaatgtcccttgcaagcagcactaacacagaatagagtcatataccctcagttctgggttcagcaaaatgtcactatcccatctgtgggctggaccatgcaagagtcagatcactcagctgatgaacagagaaaaatgtcacaattaaacctgcaggaggttcagggatgaaattaacaatcccacacatgtcccggtattaggtataggaggttaacacttcctatatattgtgtctaagaacaggagttacaatggcaatggttgactgaatttgtgcatgagagcctcaactcctcctgcagactgtctaattagtgaagtcacagcctcataggtgtgctgaatcttgctctgagtgtcaccaactcaccagtgaactggatccacatctgagagtcaagtttccggcctttgactgcctataggtgtgagattcagaacctcaaaagtgcgctgtgttcatgtgggaaaatgacaatgtatactgtgtgtgggtgtgcatacaactgtcacaattttccctgtgagctgggccctgttagtacactctctatactacccaaaggctttatacagtgtcaatgagaatcacaattcagtctgagatcttcatctttgtttccccaagggagaatcttttccccccccaccaagatggagtcttgctctgttgcccaggctggtgtgcagtggcacgatctcagctcactgcaacctctgcctcctgggttgaagcaattttcctgcctcagcttcccgagtagatgggattacaggcatccaccaccatgcccagctaatttttgtatttttagtagagatggggtttcaccatgttggccaggatgtcttgaactcctgacctcatgatctgcccgccttggcctctcaaagtgctggggttaagtcgtgagccaccgtgtctggccagatcttcatctttgtatgcaaccacaaccatacctatggccctatgcccagatattagagtcaacatctctccaattggctgggtccagatagtagagtcctcactgcttatgttctgggtttagaactgtgtcatcattcaaacagtggttggatgctcacatatgacagtcacaattccaactatgggctgtgtttgcatgggaaattcaagacctcagcaatgggctctttctctgtgtgagggtgataatcctaatggctggtgaggtgtgcatataagaaacaaaatctcaccaatgtgctgtgccctgtgataacactctctctaacacttgaaggcattatattataggtggggttgtggcaatcctgtatgacctgcatacaaagagaggacccaggatgttgctcatttttctaagtcgagctatgaaagacagtatcttttctaatagctgatttgattaatgaaagccatcatcacatttgtaagctgacaacagtgtatgtcataattaggtagggacctagcaggagagtcacatcacctggatttcagccaaggatatctcacaatcttccctgagggaggcagccaagcaggagtgtcacatcacctgggtgctcagctagggatatgttacaattctctcctgaaagcacagcacaggcaacagactcatgtcacctgggtgctgagctcagcactatgtcacaatgctcgctggggtcaagacaaagacagaagagccacatcacctggtgtctggttccagggatatgtcacaatccttcctgtgaaggggattataaaatgtcatatcttctaggtcatggatgcagatatatgtcacaaggtccctgtgggcagagcccaggcaggaacatactatcctataggtgttgggcctaatgatattttaaaataaccaaaatatgggaggcccaggcaaaacaggagagtcacatcacttacatgctgggtccagtgatacgccacaatacccctttttggcagggcctaggcagaagaccattacattgcctagttgatgaatgaaaagatatgttatgtccgggcacggtagctcaagcctgtaatcccagcactttgggaggccgaggcaggtggatcacaaggtcaagagatcaagaccatcttggccaacatggtgaaaccccgtctctactaaaaatacaaaaatcagctgggcatggtggcaggcacctgtagtcccagctactggggaggctaaggcaggagaatcgcttgaacctgggaggtgaaggttgcagtgagccgagattgcaccactgcactccagcctggcaacagagcgagactccgtctcaaaaaagtaaaaaggaaagatacgttataatacctctgggctcaaaaatatgtcaaaatgccttatgtaggtagggctctggaaaaaaaaaaaaatcacatgacctaagggctggggtcagctacaagtaacaaactccctagttggcaggacccatgcatgagagaagagtcacatcacttaggtgctgggctcagcgacatgtaacaaagctttttggcagggcccaggcagaagaggagtgtcacatcacctaggtgattaataaaatgatagctcataatacccctatgggcagggcccacgcaggagagttgcattatctaggaggtggagtcagtgatatgtgtcaacacacaatgtgtgcaggtcccaggctggagaggagtcacctcatctaggttattgacccagtgatacatcacaattattttttgggcagagaccaaacaatagagaagagtcacatcacctagatgctgggcccagctatgtatcacaacaccctgagaagagggcccaaacaaaagatttgcatcacctaactgagggtctcagacatatgacacaattcccgctgtgggtagggctcaggaagaactgtagagtcacataaccttggagctgggcccaactatatgtcaaaatcatctcagtgagtggggaccaggaataagaggagagtcaaatcatgaaggtgaagggccaagcaatgtcacactccccagtgtggacaggtcccaggaggaagagccacataatgtcagtgatgggcccagatatatgtcacaatgaattccgtgagccagaagaagaatcacatcacccgtgtgctaaactcagtaataagtcactctctcctctgtgggcaaggcacaggcaggagaggagagtcacataacctctgttctgggcccaaagttatgtcacaatctctttttgggcaacatccaggtagagagaagagtcacataaaatagtaaatggcccagagatgtatcttgtaggtaccttgcaggaagggtcaggaaggagactcacatcacattgcttctgggcccagcaatacatcaccatgccttctgagggcagtggcaaggctaaagagtaacgttactttagtattagacccagtgacatgtcacagtatcccctgcaggcagaacctaagacaaggaggagagttatgtcagctaggtgccaagcccagtgatatgtcacaatcccttctgtgagcaggagccacgtaggagaacagagtcatattacctgtgtgatgggtgcagggatgtcacaatgtcctctgtaggcaggacctaggcagtatggttacctcacctgggtgtgtgacagagcaatatgtcacaatgacccacatgggaagagcacaagcagaagagtcacataacctgagtgtggggcccagcgatatgacacaatgccccctgtggaagagacaaggcaggagagaagattcacaccacctgggtacaaactcagtgatatgtcacaatgtcctctgtgggcagtgccaaggcagtagaattgtcacaccacctctctgggtccagggatatgtcacaatcccatttgtggcctgggcccagggaggagcatcaaatcactctggtgctgggtaaagtgatatgtcataatcacaccagcaggaatgtttagggatgagattatgcatctggactggaaagaatcaacacatcaaaaatattaccagactgtgcaagatggctcatgcctgtaatcccagcactttggaggccaaggtgaggggatatctggaggccaggatttggagactatcttgggggcaatgtggtggacgagacctctattgaacaataataataaaagtttaaaaaagaagctgggtgtggtggctcacgcctctaatcccagctactcaggaggctgaggcaggagaatcgcttgaacctgggaggtggaagttgcagtgagctgagaatgcacaattgcactccagcctgggggacaagagtgaaactccttccccccaaaaatgaatgaatgaataaataaataaataaatccgaggtcaactgggtgcagtggctcatgcctgtaatcccaaaactttgggaagatgaagcagacagatcacaagggcaggagttcgagaccagcctggtcaatatggtgaaaccccatctctactaaaaatacaaaaattagccaggcgtggtggcgggtgcctatagtcccagctactcaggaggttgaggcaggagaatcgcttgaacctgggaggtagaggttgcagtgagccgagatcatgccactgcattccagcctgggaaacagagtgatactccatctcaaaaaatatatatattaatattaataattctgaggtcctagagaaaaacagtcttgagtcaaaaatacaaaagacctatttagcagttagaatagtttgtatatatttcaactaggcaggaaaagaatttacatacaaaagttttgtacagaaaatgatttaagaaaagaaaagagaaaaatctctgcccttattttcaagaagggtgaagcctgtatttgtaatttgtatctttttttacaacatccaggtctagggccataatcttgaactcatggacatctgaattctagtaggtgctagattcaggaacctgagggctggccttgggcacattctgcacatcaaaaagtgtttgtggggaagtaaaagacagaagagggaaagatgctatcaataactcattaataggggacagtgcatggtaactgggaggactcttatgctacagatactaaccaaggcagggctatattctgacatattcctgtgtccatgcaggcagatgagattacgattggtggctcacaagcccaggttgatgaagagatcaggttgtgctgcagtttcacggtctggaatagagattagccaggagtcctctatgaacttgtataattttttggtgagaaattctaggggcaaaggcactatacacataattcctgagagtcaaagtacacttatggtatgtgtacacttatggtacacaaagtacacttatggtatgtgaaatacacttatggggttgggcacggtggctcacgcctataatcctagcactttgggaggccaaggcaggtggatcacctggggtcaggagttagagaccagactggccaaaatggtgaaacactgtctctactaaaaatacaaaaaattagctggaggtagtgacacatgcctgtagtcccagctactcatgaggctgaggtaggagaactacttgaacccaggaggcagaggttgtagtgagcgaagatcatgccattgctctccagcctgggtgacaagagcaagactccgtctcaaaaaaaaaaaaaaaaaaaaagaaagaaaaagaaatacactacttatggatttcctgaaggtcaaaatacacttatggtatagtgttgtatgttggagagaggaagatggcctcatttccaaaatttgagaatgtaggaacaaaagtggaaatttacaattttactgcaagcctgagttaggctaggggaaaacggtggtggcttagaggccctgcttgtcatacattagaaagaccagtcttcctgtggagagttaaaataattaaaccactctccctctccctctctctctccctctccctctccctctttcttctgtctccctctgttgccgaggctggactgtactgctgtggtctcgggtcactgcagcctccctgccccgggctcccgtggttctcctgcctcggcctgctgagtgcctgggactgcgggtgcacgccgccacacctgactgatttttgtatttttggaggagacggggtttcgccatgttgacctggctggtctccagctcctgacctctagtggtctgcccacctcggcctcctggggtgctgggattgcagacggagttctcgctcactcagtgctcagtgttgcccaggctggagtgcagtggcatgatctcggctcgccacaacctccaccttccagccgcctgccttggcctcccaaagtgctaagattacagcctctgcccagccgccaccccgtctgggaagtgaggtgcacctctgcccagctgccccatcagggaagtgaggagcacctctgcccggccgccccatctgggaagtgaggagcccctctgcccggccgccccatctgggaagtgaggagcgcctctgccaggccaccccatctgggaagtgtacccaacagctctgaagagacagcgaccatcgagaatggcccatgatgatgatggcagttttgtcaaaaagaaaagaaggaaatgtggggaaaagaaagagaggtcagattgttactatgtctgtgtagaaagaagttgacataggagacatcattttgttctgtactaagaaaaattctgccttgggatgctgtgaatctataaccttaaccccaaccccgtgctctctgaaacatgtgctgtgtcaacccagggttaaatggattaagggcagtgcttaaacagatgcttgaaggcagcatgctcattaagagtcatcaccactccctaatctcaagtacccagggacacaaacactgctgaaggccacagggacctctgcctaggaaaaccagagacccctgttcacgtgtttatctgctgaccttctctccactattatcctatgaccctgccacatccctctctgagaaacacccaagaatgatcaataaatactaaaataaataaataaataaataaaaataattaaacagcgggaaattagactgaagtggctctagtgccctgtgttcataagtaaaacatctaaaacctaactaatgcatttcttataaattactctcttagggagaaaaaaactcaggcctaagtgattataaacctgcaattaacctctggttacaaaaccaggaaatttacacctggatcatacaaataaggtaactacataactgtaatccattcttgaatctggtttgccttctcaagcactttataaaaccctttttttttatccccctcaggtggaccacaaatcagggccgggtgctttccatttcaccaatcacggtttgttcaaataaacccgttaatgttttaacattgactccctttagttttaacagaagagaccatgcacctggtggctcaggcctgtaatcccagcactttgggaggccgaggtgggcaggtcacttgaggccagtagtttcagacaagcctggtcaacatcgcaaaaccccgtctctactaaaaatacaaaaattaaccaggcgaagtgcaaaggtaatcccaactattcgagaggctgaggcatgagaattgcttgagcctgggaggaggttacagtaaaccaagatcgcaccactaaagtttactctgggagacagagtgagcctctgtctctccatcttaacaaaaaaaaaataacaagagagaatgaagaccccatgggccacagctcctcccatgcacacaccaagtcaggattctgccctgatgacccccctggcatccctgaacactctgggaaatactcggggctgcaggtgcagagctgcccagagagctccatgtagggcgccccccaggcaccaggtgcgatgccagggtcctggctgcaggcccacctgccatcttgcagccagagggcctggggaggagccgagccagtggggactcaggacggcaacatgggagcagactctggggaggccggtcccgtgatttcacagcctggtctcccctctctggatgcccaaccctgcatactcaccatttcccagcttccaggatgtcctggcatcttagctatgcgtctcccaggacctgcatcacagggcaacagaggctgtgacagagtcactgggggctcccaaggaggaggacgcaaaaccggaagaggacgcagaacagtggaaatgaattccaagctctggagggagggagaaaaaggcccaccaaatgctagaagccacgccctcctctctgagagcctgattgggcagttcccatgccagcaccactgattggataaagctccaggacccacatcccacctccaccctccccagcattactgcattttatggactgggaaacaggttcaagtatgcagggtcacatgcccagagtactgcaactaattaagaagagagctgagacttgaaatgcacttgcttttttccttacctgggttggcttgtataatgcaccttattggctaattaagggtaagaagaggaatatttagacaacttttttaaaaagttttttttttttttttggccaggttcagtggctcatgcctgtaatcccagcactttgggaggctgaggcaagctgatcatgaagtcaggagttcaagaccagcctggccaaaatggtgaaactccatctccactaaaaatacaaaaatcagctgggcctggtggctggcacctgtaatcccagctactcaggaggctgaggcaggacaattgcttgaatccaggagtcagaggttgcagtgagctgagatcgcgccattgcactccagcctgggctgtgaatccagcaggaccagccacccaacagtcagctcccagtcgtgacctgagtccctggtggtgcagctctgctccaggcccctctggctgcaagatggtgactgggcctgcagctgggacccttgcatccttccccatccctgcacggccccctatctggaactctctgggcagtgttaggtacagtgagttcctcttcaaagagtcaacttgttcagcttccttgttctttgatctcaattttcaaagcctaacttcctcattctttgcagctccttgcccctagttatggtaaacaaccttcccaccagtcctaatctataactcacatctgttcccttgattacccgctctgtaactgaccttctgtccaaactgctcttactgccactgtaacccacacctctgccccatttgaaatagccaatcaggattagcttagattgtgcattccagccccaatgacacagcaacggggactaactgttttagggataaaagccccttcccttccttgttcgatatgctcttgcaattgtgactggcacaagctgcaaccttctgcagaactaaattgccttgctgagaaagctttttgccagagtgctgattctcctttgtgggactgagcatttgtttctaacagcagctctgcacctgcagattgttcccagagtcttcccagagtgttcagagatgctagacaggtcatcagggcagaaactcaactcagtgtatgtgtgggaggagctgcagccctggggtccccagtctctctggtgtcgagaccagcttggccggggagaccctaacccagtggcactagaggaattaaagacacacacacagaaatatagaggtgtaaagtgggaaatcaggggtctcacagccttcagagctgatgtgggcagcaagtcacccaggtgccaaggcaagagaccgaggacacaagctgttccagtataataaagtataaaacaagaatagttataccagatatacatcttagatatgattatatatgaatatcattgatcattagtttgtagcaattactctttattccaatattataataatccttgctctataatcataacctaggaaaaaccaggccgtacagagataggagctgaggggacatagtgaggagtgaccagaagacaagagtgcgagccttctgttatgcccggacagggccaccagaggactccttggtctagtagtaatgtcagcgtctgggaagacgcccattgccgagcggaccgtggtctagcggtagcctcagtgtcaaggaaaaacaccggctacttagcagactgggaaagggagtctccctttccccgggggagtttagagaagactctactcctccacctcttgtggagggcctaacattagtcaggctcacctgtggttatcctgaggcctaaccatctccctgtgatgctgtgcttcagtggtcatgctcctagtccaccttcgtgttccatcctgtacacctggctctgccttctagatagcagtagtaaattagtgaaagtattaaaagtctctgatatgcagaaatagtggcataagctgtctttctctctgtctctgctccctctctgcctcagctgccaggcagggaagggccccctgtccagtggacatgtgacccacatgaccttacctatcattggagatgactcacactctttaccctgccccttttgctttgtatccattaaataacagcacagccagacattcggagccactaccggtctctgtgacttggtggtagtggtcccccaagcccagctctcttttcttttatctctttgtcttgtgtctttatttctacactctctcacctccacacatggggagagacccaccgaccctgtggggctgctcccttcagctgagagcctcgaacagagatttacccacatatttattaatagcaaacgagtcattagcattgtttctgtagatattagattaactaaaagtatcccttataggaaacaaagggatgggctgaaataaggggatgggtttggctagttgtctgcagcagtagcatgtccttaaggcacagatcactcatgctatcatttgtggtttaagaatgcctttaagtggttttctgccctggatggcccaggtgttccttgccctcattccagtaaacccacaaccttccagcatgggcatcatggccattttgaacatgtcacagtgctgcaaagattttgcttatggccagtttatggccagattttgggggggggcctgttcccaacatgtcccctttctttgatttgcaaagcgataaaagcaagggcagctttgtcacggtgagctacttctcacaggagtcaggatccacatctgcggactatacaatgacaaacaacacagattaaaagtacaatcatcattgaaatcacagagtttccaagtgtttttatccattttaatgggttactagctgctaatctgtctgcagctcctttaagcactccagttcttggcagtaaggtcaggtgtgcctgggatgctttaaatatttgttcttttatccaaaaacaagtttgtagagtgtctttctagatgcttttttattctttcccaaattttgatcttattaagccacaaatccttatgtttagctcctacaatgggccatatcttttgaggttgaggtgccactataccaccattgttccagataataggaactcttgccatactttttatcatttctaccatctgaccattttgttcagaccatatgaacatagtgtggccatggcacgcagactgagaagtgcaattcaagccaaacatccccttaggggaccaatgattccataggaatcattgtgcagcacctctgcctgttctgcaatgcaatcttcctaaacaagtacattcatattttctggccaggtcaattttgttacaaataggtttttgagggcagtatgcctcaatgtagcagcagatttattatggtaaatactgagatcagaaagcatgtgtaactgtgccatagagtgattacatccaggcatcatttccagctaagattgataaatatgcctaataagtataattgttctctgtgtcagcctttgttgaaggaatactcatggcagtggtgatcattgctatcatagctgccattaaattactcatggtgactggttgtcccactttcctcaggttttctttcaccatctgtgacagcttcttgatctgtccccaagtgggtggctgtgttcaatgggtgttgctcatgacagttggggtccttctcagtgtcagtcttgacatggctgcaaccagggggtccttgggatcctcccagagtctcttccttggcatctggctcatgataaggtttcaggtgtcttgatggtatccaaatcggctattgcttttggcctggagaaacataagcataaccgctaccccaagttattattttacctatttcccaactttttgttatcagatctctccaccaaaccagttgttctgcttctgtctttgcagctggtttctgtagatgctgttcagctgctgataacatctggcctttggtcaggctcaaaaaatttaaagttaataatgctagattcaattgtgtaggggctgtcccataatccctatttcgcccccttttttgcttttgttatcagttgttcatctgtatgaaatcgtaactgagcattttcaattaactgtgtggaatgaaccacatatgaagaatcggaaatcacattaataggcatatcaaaagcagtcaatacctcaattacagctacaagctttgctttttatagggagtctggaaaactttacttttcaagccagaataagaagctttaccattactagacccatctgtaaaacaatgaaaacacttagcaggctgcaggttgtttaccacaggaattgtaaatgcaaaccgttcacagtcttgctaggctaaagggatagtaaagaaacagtcttttaaatctatgactattaaaggacaattttttggaattatagcaggagaaggcaatccttgctgtaatgctcccataggttgtataactgaattgatagctcttaagtcagttaacattctccatttacctgattttttcttagttatgaaaactggagaattccaaggggaaaatgttggagccatttcctaattgttcagtaactaatttctctaaagcttccagtttctctttacttagccaccattgttctatccaaattggcttatctgttaaccattttaaaggtataggttctggaggcttgacaatggccgccatcaaaaatgatatcctaatctttggtgagaactttgcttttctccttgaagtggctctttcaaaccttgcaaatttttttctagtcccataccagggacatactccatttcatgcatcatacattgactttgagggctatataattgttctggaattagaacttgtgctccccattgttgtaataaatctctcccacataaatttataggtacagaaattacaattggttgaatagtcccaacttgtccatcgggcccttcacaatgcaaaatataactactttgatatacttcaggggctttaccaactccaactatgttaaattgagcaggttgaattggccacacagatggccagtgctgtagagaaatgattgaaatgtccgctcctgtatctaccaaacctttaattttctttccctgaatagttatttatttcacaggtaggacgtttatcagtaattgatttacccaataaactgctttgccttgtatatttgtgcttccaaatccacctgtttgtttaatttcactttttcccattcccatatacggcacaatcaggagctgtgctatgcactctcctggctctgctttccagggaacagaagtagatataacaatttgaatttccccattgtaatctgaattaatgactcctgtatgtatttctacccctttttaaacttaaactagaccttcctaaaagtaatcctattgtccccgctggcaagtgtccacagactcctgttgggaccttttgcaggggttccccaggcagaaggctcacagcttttgtgcagcataaatctactgtggcattaccagctgtggcgggggacagacattgtacaggggtgagtacagcctgagctggaaatgccccagtttagaacggggcccaggatgggcccctcatggtgttgcccaaaattgggttccctcctctatcaaacttagaatgacactgattagcccaatattttccttttttacattttggaaatatttcaggctcagcagttttcttttttcccctatctggcggcctgactcgctgattatttctacattcttttttagtatgaatagcttgtttaaattctttgagtaatttaaaaggaaaggactcaaatgtagctataatattttcctgttgatctggagggtgtattctaacagggagctgccaagcctctaaatcaccctctcatctagcttgctgaattcctgcctgaatagaactaagagcagtcactcggggcgccgctcgaacagtcactggggcaactactttttgcccagtgtcctccagaaaagaaagatctggagggtctttttcttcaaaataataatgagggggtgcagaagggtaggaatgaacctctccctcctttgccgctttagctttagctggcaaataaacctgctctgtaacctcttctgttaattcgttatactctccttcctcctcatcatcagtgtgaaaaagttccaaggtggaacaaaccagaccccacacttgtcccatttttaccctgatgcttctgagctcccctttttactcaccacggggattgctttaagagtactcgggtgtcctccagcttagttccatgttttccaaccatcgctccggcaaccctttgacctgcattggagcccccatgatggatgccacttgccaggaccagctcggtcagggagaccctaacccagcggtggtagaggaattaaagacacacagaaatatagaggtgtaaagtgggaaatcaggggtctcccagccttcagagctgagagcatcgaacagagatttacccacgtatttatgagcagcaagccagtcattagcattctttctatggatattagattaactaaaagtatcccttacgggaaacgaagggatgggccaaaataaagggatgggtttggctagttatctgcagtgggagcatgtccttaaggcacagatcgctcgtgctattgtttgtggtttaaggatgcctctaagtggttttctgccctaggtggcctaggtgttccttgccctcattctggtaaacccacaaccttccagtgtgggcatcatggccatcatgaacacatcacagtgctgcagagattttgtgtatggccagttttggggccagcttatggccagattttggggggcctgttcccaacactgctattaaatttttttgttaagatggagtttagctctgtctcccaggctaaagtgtaatggtataatatcgctttactctaaactttgcctctgaggctcaagcgattcttgtgcctctgcctccagagtagctgagattacagatgtgcaccaccacaccaagctaatttttgcatttttagtaaagatggggttttgccctgttggccaagctggtctcaaactccttgacctcaggtgatctgcccgcctcggactcccaaagtgctgtgattacaggagtgagccgccacgtatggtctctcctactaaaagttaaagaacatcagtgtttaaacattaatgagttcattggagcaaacagtgattggtgaaatgaaaagcgcccaaccgtggtttgtggctcatgtgaggggcatgaaggaaaggttttataaagtgcttgagaaggcaaaccagattcaagaattggttacagttatgcagtcaccttacttgcatgttccaggtagaaatgtcctccttatataattagaggttaattgcaggtttatgataggccaagcctgaatttttttcatcctaagatagtaatttgtaagaaatgcattcaagttaggtttcagatattttacttatgagcacagggcactagagccacttcagtctaatttcctgctgtttatttatttattttgagatggagtctcactctgttgcccaggctggagtgcaatggcatgatcttggctcactgtaacatttgcctcccagattcaagtgattctcctgcctcagcctcttgagtagctgggattacaggtgcacaccaccacgctcagctaatttttgtatttttagtagagatgaggttgcaccatgttggccaggctggtctcaaactcctgacctggtgatccaccctcctcagcctcccaaagtactgggattacaggtgtgagccactgcacccagccatagttagcttttcatgtctgttatttttagtgggtgatttcaaataaataattctttcactttgctttgggaatgctactagggaaaagaaatagagaaaatttttcttccactgtgactatagaaagtgaatacatttccacaagcaaatgtgaaagattaattgatgaatttcatatatttgtcaaaacatcagatcctcttttttataggatctagaatttgtaacagtggatatctctattttgtactctgctctctgaatgtccaagtttaatgctaaattttatgagatgaatcttggcaccttctagaaatgtttatatatgattgtctattaaattatttagtatgaataataaggaagcacaaaaagggtcagaaaaaaaggtgggaggggaagggagggaaaaaacatggtaaaatcagatcctaggtgagagaatatttcacccagaactcagcctattcttaagagggtcataaaaagggcttgtatgttagcttagagtaagattgagtctaagttaggaggcctgaggaaggaaaaaaacttaagcaaagtttggttaacaatttattattcaattatttatgaggcaaaaaaaaaaaaagaatttagagagtctgtggctttgtgatatcaaaaacaggaagggtgttctgtgcagtaagatgaccttggaaaacacaaaagatgggggattactttaatcacagctgttacctacccaccccatttttccccttcactttttttgccctgtacatttcttccatttggctgttgctgacaacaacaatcgttgtctttttttttttttttggcagtgggagggggatggttacggagtgtttctttgtcacccaggctggtgttcagtggcttgatctcggctcactgcaactttcgcctcccggattcaagtgattctcctgcctcagtctcctgagtagctgggattacaggtgcacaccaccatgcctggctaatttttgtatttttagtagagatggggtttcaccatgttggtcaggctggtcttgaactcctgacctcgtgattcacccgcctcgccccccccaaagtgctgggattacaggtataagccactgtgcctggcctctgtttttaattatatttctctcacattgttcagaattactagacctgatattaacacataatgtgttcacaaggcttcactctgtatggacctttttctcttgggcttccagtcacaacccacagtcatgcagcaaagttcacactgccctcaaagtctgcaggctgaatgttcttcctgcctatttgggatctaacattcttttttgtttgttttttttttttttttgagacggcgtgttgctctgtcacccaggttggagtgcagtggcgtgatctcagcttactgcaagctttgcctcccgggttcatgccattctcctgcctcagcctcccaagtagctggcactacaggtgcacgccaccactcccggctaattttttttgtatttttagtagagacggggtttcatcgtgttagccaggatggtctcgatctcctgaccttgtgatccatctgcctcggctgggattacaggcgtgagccaccacgcccggccgggatctaacattcttaatagtgcagtttgaccagatttctacaaaaacaaacatggcattaatcagctattctcactgtgtcttttcattcccccagcatcttcagactttaaattgattcaaatagcatgtggcctgaaaacccagctaggttcacacatttgcattgagtaggcctgagaatctaaatatttcactcattctcttgcctgaatacccataaatgtgccaagtgtccctgtggcttcctttcctgcccctccaaacctaaatctgcagttccaaattttgtccagcttctagggttctccagtatgtgttagagcagccttcatgttggaatttctcctccagtttttctctccttactgtaatgcctagaatacagagccaagttaattgtacctagaatctacatataagggctgatatccacctggaattcacaagacagggccagacttaacattttgggcagtgagccactgtggttgtgtgaggggctcctggtgtaaggtaaatttggtggcagaatctataggtgtacagaagcaacttagcagaggcaaggcagggccacagctgtccagagagataaagataactacatctcctgtatgtgaattgtgttactggagaagggtattcttgtccttgaacccaacagttagctcaacatatataggtaatatcagatctggatcgagaattaggggttgttctattttttattctggctccacagagtcagcctgagtctcctctgtttgaataactgttgaagcatcagcccagggccactgcagaccctctcactagcacctaggagtccttgagacatttagggatgtactgtgcagacaagggtcaggctgacaagtccaatcttcctcccatctcataaaagaatgagtaatccagggcttctttctcccatcacagaaggtatctccttatttggtgtccaaataggagttgctcctatttcctgatatttgggtggagaacaagtaggaggtctggaggcccaaactgataggttaacaaattgtttccattttatttggccatgagaagaacaggtgaagcagtcatggaccctaccatcaaggaatttttattctagagccaatggataaattatttaatttagagtaatgcgatcagaacagagaagggagttgtatagagaacttgggcttcatttgggacactaattgtatgttgtggttgtgagttctgatgtcaccacctgaagggccacccatggacagaaaagttgtggcaattattatttctatttcttttcacttgacaagaataaatagttttctatgtaattttctttattattattatttttttttttatttgagatgaagtctcactctgttgcccaggctggagtgcagtggtatgatctcaaccacctgctacctctgcctcctgggttcaagcaattctcctgcctcaacctcctaagtagctgggactacaggtgcccacctccatgcccagctaatttttgcatttttattagagacagggtttcactgtattggccaggctggtctcgaactcctgacctcgtgattcacctgccttggcctcctaaagtgctgggattacaggcatgagccaccatgcccagcttcaatgtaattttttagaaagacctacatgatttggtaaaattggttgctattgtatcatgcaaaatagataggatgaggcttaaatcgtttaaatcagaaaagttctgggagtcaagttcttattggtcaggcttagaatggagaactgaaaataagccagcagcatagagatgagaagctgagggccagctccctgccccagccctacccagctctaccctcttctgagccttgtccaggtctggcctcaccctgatatctccctcacagaactgattagaggagatcggatttatgtgtggcaactcttggtatctcttcagagctggatctcacgattttcctagacccaaaaacgaataaatgggagcaaaggattatttatttggagccttaatttctttctttcttattgaaaccagtgcttctagagacatttcatacagcaacctgttttacacttctgcaaatccaatagtttttctacatgttatgagaaagaaaatataaacacaacaattaaaagtcttttggacctctacttaagccttcatttctgtatcccttttatcttctgtatttaggtttcatagtgataagaaaacaaacagggctgggtgccgtggttcacgcctgtaatgtcaaaactttgggaggccgaggtgggcggatcacctgaggtcaggagttcaagaccatcctggctaacatggagaaacccagtctctgtttaaaatacaaaattagccaggcatggtggcacatccctgtaatcccagctactcgggaggctgaaggaggagaatcacttgaacctgggaggaggaggtcgcagtgagctgagattgcaccattgcaccaacaagagtgaaactccatctcaaaaaaaagaaaacaaacagcctgaaccatcgtctaaatcctgctagaaattatgggacacttaatacctacttcacagaattttttgaggtttaactcacaccaggtgagtttcccagcacaacacaccacagcatacttgtgagcacatagtatgagctcaataaacattgcattaacacatgtgtacatgtttcaaaatgcattctccagccttctgtagacttcaaatagctggcaaaaaatgtgatcttttgggatggtgattagtggttttcactgtaaacaaaaaatattcatgtttcaataagaatattgtatgtaagggactttgtgtgttattcctgctttctctgagagctggagagcaatatcagcattaacagggaattttttttttttttgagacggaatctcgctctgtcgcccaggttggagtgcagtggcatgattttggctcactgcaaactccacctcccaggttcaagcaattctcctgtctcagccttccgagtagctgggactaaaggtacctgccaccatgcccagctaatttttgtatttttagtagagacggaggttcaccttgttggtcaggctggtctcaaactcctgacctcagatgatccacctgcctcggcctcccaaagagctgggaatataggcgtaagccaccacatgcggcctatggggaactttttttaaacaagccaattcctggaccccttcaaaacgtgcaggatcacattagttagagaagggcccagaataccaaatgacctatatgcacattgaagcttgagagggaatggtcagctaagtggttctcagcccaggcatccagttaagaccacatgaccagtttgaagaaataccatcacctgcgtcttcccttacaggttgtattttctcctgagtagattcagatgattatgtacttttctctccatcaatatcacagcagtaataaagggcccacctaagtgccttcttagtgcaatagacagcgtatcagtctcataatgggcccatctgtgcattggcccctaaatctggtttgtctcattacagctgatgctaaatttattcatctggctaaggtgttttctgccaaattccttcactataaagttagttatttttttctttatcaataatgagtatcttggaagggggatttactgaggtgtataaattatcaaatttaatttaaaaactcctatttcttttttttcttatatcttactttggagaataaatactttcctatttgtcaactatagatagcagcttttgaaactggaagttctgaaacaggtctcagttgtttaggtttccatttaatttcaccttcatttcacaagcatatactttattctctgtaattttagggacaaagaaaaaatatataatcaatatatctattgtcttaaaattctaaaacatactatggcacataaaataaacaaagcaaaacattaaaaaaaaatctgactcagtggatcacctgaggtcaggagtccgagaccagcctggccaatatggtgaaacctcgtctctactaataatacaaaaattagccctgcatggtggcgcacacctgtaatcccagctactcaggaggctgaggcaggagaattgcttgaacccaggaggcagaggttgcagtgaaccaagatcgtgccattgcactccagcctgggggacaagagtgaaactccatctccaaaaaataaaaaataaaaataaaaataaaataaaaaatatacaactaataatagctcttattttactttatattattgcatgttttgatcttcaattacaagcacaaaacacaaaaatagatctacaaagaatgttataattgttaaacaatttaaaacatttaattttatttatacagaactgttctactctctcacttttcatgtgtatatagtcaccatttctatgatgtgtgcataaaatgtaaacatcatttgatcaattttgtgttgctgcctttttttttttttttgagatggtgtctcgctctgtcatctaggctggagtgcaatggcgtgatctcagctcactgcaacctccgtctcctgagttcaagctattctcctgtctcagcctcccgagcagctgggactacaggcacccaccaccatgcccaactaattttttgtgtttttagtagcgatggggtttcaccgtgttagccaggatggtctcaatctcctgacctcgtgatttgcctgccgtggcctcccaaagtgttgggattacaggcatgagccactgcacctggcctgctgctttattgtttttattaatcttctcaattataaaaactgctctggccagtcgtggtggcttgcacctgtaatcccagcacttcgagaggctgaggtgggtggatcatttgaggtcaggagtttgagaccagactggccaacatggtgaaaccccatctctactaaaaatacaaaaattagctgggcatggtggcacacgcctgcagtcccagctactctactcaggaggctgaggcaggagaatggtgtgaacccaggaggcagagattgcagtgagcccagattgcatcactgcactccagcctgggggacagagcgagactccgtctcaaaaaaataaaataaaataaattaaaaaaattaaataaaaagtaactggtctgggccaggcacagcgcctcacgcctgtaatcctagcactttgggaggctgagatgggtagactgcctgaactcaggagttcgagaccagcctgggcaacatggtgaaaccttgtctctactaaaatacaaaaaaaccccaaaagcctggtgtgatgtcgggtgcctgtgatcccagctacttgggaggctgaggcaggagaattgctggaacccaggaggcagaggttgcagtgagccaagatcatgtcactgcactccagcctaggcaacactgtgagactctgcctcaaaaaaaaaagaaaagaaaagaaaagaaaagaaacaaacaaacaaacaaacaaaaaactgcttttcttgtatccaagaagttttgggtccttgtgtgttgaatttgatttatatcagggtgctttttttttttttgagatggggtctcgctctatcacccaggctgcagtgcagtggtgcaatttcgactcactgtaacctctgcctctcaggttgaagcgattctcttgcctcagcctcccaagtagctaggactacaggcgcatgccaccatgcccggctgattttttgtatttttactagagacagggtctcactgtgttagccaggatggtctcgatctcctgatctcgtgatccacccacctcagcctcttgaagtgctggattacaggcgtgagccattgtgcctggcccagggtgctttcttattttccctctaatttcttctttgactgtcatttgttgtttaggagcatgttgtttagtagccacatgttttgagttttctaattctcttcttgctatttttttctagttttatgccattgtgatcagaataaaaacaacataattttcaccttcttaaatttgaaaaagcctgtttatttctggtttaatgtataatttctcctgaaagatattttatgtattttttatttttattttcattttgttatttttttctttgctctgtcttgccctgttgcccaggctggagtgcatgggtgcagtcttgactcactgtgacctcctgaaattataatttctcaaagtataattactcctgaaaaatattttatgtaattttttgtttttatttttattttgttatttttgttgttgttgttctctcttgctctgtcgcccaggctggagtgcatgggtgcagtcttgactcactgtgacctcctgaaattataatttctcaaagtataattactcctgaaaaatattttatgtaattttttgtttttatttttactttgttatttttgttgttgttgttctctcttgctctgtcgcccaggctggagtgcatgggtgcattcttgactcactatgacctccatctccccagatcaagcagtttttctgcctcatcctcccacgtagctgaaactactggtgcgcaccaccaagcccacccaatgtctgtattttccatgatgatgaggtttcaccatgttggccaggctgggagaatatttcatgtatttttgagatgaatgtgtattctcatactgttgaatgaaatgttatgtgcatatcatctatttagtctatagtggtatacaactacactgttttcttagtagatttctgtttgaatgatctgtctgttgttttgagtaaggtattaaagttttattgtatttctgtctacttctccctacagttttgtgaatatttgctttatatatttagaagctccagtgctgggagcatacatatttttaattactatatcctcttgacaaattaacttctttattattgcatggtaaactcatttgactcttgtgatagatgttgctaggaagtcttttttgtctaatttagcaataactaccattgcacacttttgattatcattttcatggaatatcttttttcatcctttcacttttggcctatgcttgtccttaaatcaaaagggagtctcttttaggcagcatatcaatgggcttttaaaaagtgagttggtcactctttttcattgtgttgtttgttgctatatcagtgtatcacagactaagtattttatgaaaagcaaaaatttatttgcctcatgattctggaggctgagatggcaaagaatatgacactggcatctgttgaaggccttgttctgcataataacatagccaaaggcatgaggaagagacagcttccttttataagagaacctcttgatataattaacccatctcatgataagaacatttatccatttatgagggttagattgcttatggcctaatcaattcttaaaggtcccaccttttaattctattacaatggctatttaattttaacctaaaatgtggagatgacattgtgtatagtagcagtgtctgtttattggataatttattttctttatatgtaaaatagtgataggttactattaataagttactattgtgattttgttttttctgtttatttaaattttaaaaaatattttattcttgtcctgtctttcctatggttttgttagtttgtgtcaagacagggttatgctttgttgcccaagctagaacacagtggtatatcagtgtgagtcacagccctctgtagcctcaacttcctgggctcaagcagtcctcccatctcagccacctaggtggctgagactacaggcatgctccacaacagccagctatttttttcatagagaaatgtctcattatgttgctcaggctggtatcaaactcctgagctcaagtaattctcccatctcagtctctcaaagtgctgggattttaatagtctagtttaggatgataacaatttaacttctgtgtatgtaaaaactgtacacattttcttcttttacacacttaatactatatagtcatactttataactttttatgttgtgtattcattaaaaaattattgtcactgtatttttaatactttttgtatagatcttattttagagtttaaagtatttttacaaaaccattacaatattctgaatttcactatatacttatcatttccagtgacatttatactttaatgtttttcatattgttagttctgattccatcattttaatgtgaagaattccctgtatcatttcttgtaagacaggttgagtggtgataaatttcctcacctttttcctttgtcttgaaatgtcttgatctgttttatggctaaaggacagctttattggatatagtcttttcagttgtcaggtttttcttttcttctttcagcattttaaatatataattgaatcttctggtttgcaatatttttgctgaaaaatccactgattacataaagtttctcttgtatgtaaagaatctcttatctcttcctgttttcaagatttgtgctttatctgtgaatgttgacaatttaatgatattgtgttctagggtaatatttactaggtttatattttttttctgtggataaattgagcttcataaaactggatgttcatatccttctctaaatttagaaagattttctttgagacaggggctcactctgtcccccaagctgaagtgcagtggcatgatctcagctcactgcaacctctgcttttcaggctcaagtgatcttcccacatctgccacccaagtagctgaaactaaaggcatgtgccaccctgcctggctaatttttgtatttttttgtagagatgggattttgtcatattgcccaggctggtctcaaacacttaagctcaagccatgcacccaccttggcctctcagagtgctgggattacagatgtgagccacaaggctcagcctagatttggaaagttttcagacattatgtctttcaatctcctttattctttttctctgtcttcttctgaaaattctaaaatgtgtcaatttgttcactttatgattgattactttcaaatgacaagtttttgagtttgttgaattttcttttttataattgagtctcctgttaaaattttctactacacttcttcagttctgccattgtttaccttaactgcaggatttttgtgtggtcatttttatggtttttatttctctctctctctctctctctctctctctctctctctatatatatatatatatatatatatatatatgtataaaaaacatgagatgtcattttgctgtgttggccaggttggtcttgaactcctggtcccaagtaatgctcctgcctcagcatcccaaagttttattattataggtgtgggccaccatgcttggcctacttatgtattgtttctaattttgtttctgtgttgtttcctaaaaattttttagttatctgtgttctttgcatcttattgaaatttttaaagaaaattgttttcttttttaaaactttttgagatgaactctcactctgtcaccccagctggagtgcagaggcatgaccttgggtcactgcaacctctgcctcccaggttcatgtgattttcctgcctcagccacccgagtagctgggaatacaggtgcctgccaccacacctggctaatttttgtatttttagtaaagatggggtttcaacatattggtcaggctagtctagaactcatgatgtcatgtgatccacccaccttggcctccacaagtgctgggattacaggcatgagtcactgtgcccagccaggaagacttatttgagggaataataataataaaacaacaacaacaacaacaaaacttccatagctttgctagagatttacacattcagatacaaaaagctcaaagagcccccaggaaattcattacaaaaagataattacctaggctgtagtcatcaggttatctaatgtcaagatgaagaaaataatcttaagagctgtgaggtgaaagcatcaggttacctataaataaaaacctaccagattaacagcagacttttcagcagaaatattacaagtgagaagggattggcattctatctttagcctccttaaacaaaataattatcagccaagaattttgaatccagtgagataaaggaatataaatgaagaagagataaactctctttcacagaaacagatgctgagagaatttgccactgccaactcagcactacaagaaatgctgaaaggatatctaaatcttgaaacaaaacctcaaaatatacacgagtagactctccttaattcataaatcttacaggacctataaaacagtaacacaaagaaaaatatcaagatattcaggcaacagctggcatgatgaatccagcagtacctcacttctcactactaatgttgaatgtaactggcaaaagtgcttcgctttaaaaatacagaatagcagaataaataggaatccctacaacaagtagctgctgtctacaagagactcaatgtaagcatacaccaagaaactagagaaagaacaaatcaaactcaaacccggcagaagaaaagaaataacaaaaatctgaataaaatcagagaaaaactgaataaaattgaaacaaaaccacaaaagataaaacaagaatctggttctttgaaaagataaacaaaactgatatgccattagtgagattaactaaaagaagcagagagagaagctccaaataagctcaattagaaacaaaacgggagatattacaaccaataccacagaaatacaaaagattattcaaggctactaagaacacctttatgtgcacaaactagaaaacctagaaacaataattcttggaaaaaatataacccacctagattaaactacaaagaaataggcactctgaacagaccgataacaagtagtaggattgaaacagcaatttaaaaaattgtcattaacaaaaaagtccaggaccagatgaatttacaggtgaattctatcagacattcaaagatgaattggtaccaatcctactgaaactactccaaaaagtatagaaagtggaaatccttcctaaattattatatgaagccaatatcacctgaatatgaaaaccaggataggacataacacaaaaagaaagctgcactccaatgttcctgatgaaaatgaatttaaaaaattgtcaacaaaatactagctagccaaacacaacagcatatcaataagataatacaccatggtcaagtgcattttataccagggatgcagggataaatgtaatagaccacaaataaaattcaaaacaaaaattatacaatcatctcaatagatgcaaaaaaagcatttgataaaatccggtacctttttaagattaagaccctcagcaatatcagcatagaagggacataccttaacataatgaaagccatctatgacaaacccaaagaaaacattacactgaatggggaaaaattggaagcattccctctgtgaactgaaataagacaaggataggccgggcacggtggctcacgcctgtaatcccagcactttgggaggccaaggcgggtggatcatgaggtcaggagatcgagaccatcctggctaacaaggtgaaaccccgtctctactaaaaatacaaaaaattagccgggcgcggtggcgggcgcctgtagtcccagctactcgggaggctgaggcaggagaatggcgtgaacccgggaagcggagcttgcagtgagccgagattgcgccactgcagtccgcagtccggcctgggcaacagagcgagactccgtctcaaaaaaaaaaaaaaaaaaaaaaaaaaaaagacaaggatgcccactctcactctcaccacttctattcaacataatactggaggtcctagccagagcaatcagacaaaagaaagaaatagatggcatttaaattagtaaagaagtcaaactgtcactgtttactgatgcgtatgattgtatacctagaaagccctaaagactcatccaaataacttctagatctgttaaataagtccagtaaagtttcaggatacaaaataaatgtacacaaatcaatagcactgcaaaacataaacagctactaagctgaaaatccagtaaagaaccgaaaccctattacaacagctgcaaaaaatataaaataattagggccgagtgcggtggctcacgtttgtaatcccagcactttgtgaggctgaggattgcttgagctcagaagtttgagaccagcctggacaacatggcaaaaccccctctatacaaaaattagccaggcgtggtggtgcattcctataatccaagctacttgggaggctgaggcactagaattgcttgaacctgggaggtggagtttgcagtaagctgagatcacgccactgcactccagcctgggtgaaagagtaagactctgtctctaaataaataaataaataaaattaggaatatacttaaccaatgaggtaaaatgtccctacaaggcaaaccacaaaacactgctgaaaaaaatcatacataacacaaaaacacaccccatgctcatggatgggtagagtcaatattgtaaaaataaccatactgccaaaatctgtatacaaatttcatgcaatttccatcaaaatgtcatcattattattcacagaactagaaaaaacaatcctaaaattcatatggaaccaaaaaaaaaagcccacatagacaaaacaacactaagtaaaaagaacaatctgaaggcatcatgttacttgatgtcaaatcatatgacaaggctatagttaccaaaacagcatggtactggtagaaaaacaggcaggtagaccaatggaacagaatagtgaacccagaaatagagccaaatacttacagccaacttttttgacaaagtaaataagaacataaagtgggagaaaggacactctattcaacaaatgttgctgggataattggcaagccatatgtagaagaataaaactggaaactcatctctcaccttataaaaattcaacttaagatggatcaatcacttaaatgtaaggtctgaaactataaaaattgtagaagataccatcagaaaaatgattctagacatcggcttaggcaaaggttcatgaccaagaacctaacagcaaatgcaacaaaaacaaagataaatcaatgggccttaaactaaaatgcacaagtgggagaaaacttttataaactattcatctgacaaaggaataatatccagaatctacaaggagctcaaacagtcagcaataaaactaataattccatcaaaaagttggctaagaacatgaatagtcaattctaagaagatatacagatggccaacaaacatgaaaaaatcctcaatatccctaattatcagggaaatacaagttaaaacaataaagtgataccaccttctgcaagaatgaccataattaaaatatcaaaaaaatattacatgttcacattgatgtggtgaaaagggagcacttctacactgctggtgggaatgtaaactattaggctcgtgcaaaagtaatcacagttttgccattaaaagtaatgaaggccgagcgaggtggctcaggtctgtattcccagcactttgggaggccaaggagggtggatcacgaggtcaggagttccagaccatcctggctaacactgtgaaaccccgcctctactaaaaatacaaaaaattagccaggtgtggtggcacgtgcctatagtcccagctactagggaggctgaggcaggagaattgcttgaacccaggaggcagaggttgcagtgagccaaggtcacgctgctgcactccagcctcactccagagtgagactctgtctcaaaaaaaaaaaaaaagtttatttctgttttaatagtcagtaatcacttgctacatgtgtttcctgtatgtgatactgcagtctctctgctgctataacatttacatttggtctcagcagactcaaactgtcattccaaagtatcccatcatttctttcaccactttatgtaatgcagggaagaaactagggtctggaaaggccccttgaagccagaaataaatatgtacgtgccagtatttttcccatcttttaaaaaagaaaccaggactctccctctccctctccctctccccacggtctccctctccctctctttccacggtctccctctgatgccgagccgaagctggactgtactgccgccatctcagctcactgcaacctccctgcctgattctcctgcctcagcctgccgagtgcctgcgattgcaggcacgcgccgccacgcctgactggttttcatatttttttggtggaaacggggtttcactgtgttggctgggctggtctccagctcctaactgcaagtgatccgccagcctcggcctcccgaggtgccgggattgcagacagagtctcgttaactcagtgctcaatggtgcccaggctggagtgcagtggcatgatctcggctcactacaacctccacctcccagcctcctgccttggcttcccaaagtgccgagattgcagcctctgcctggccgccaccccatctgggaagtgaggatcctctctgcccagccacccatcgtctgggatgtgaggagcccctctgcctggctgcccagtctggaaagtgaggagcatctctgcccggctgccatcccatctaggaagtgaggagcgtctctgcctggccgcccatcgtctgagatgtggggagcacctctgccccgccgccccgtctgggatgtgaggagcgcctctgcccggccgcgaccccatctgggagatgaggagcgtctctgcccggcccccccgtctgagaagtgaggagaccctccgcccggcagctgccccgtctgagaagtgaggagcccctccgcccggcagccaccctgtctgggaagtgaggatcgtctccgcccggcagccaccccgtccgggagggaggtgggggtcagcccccacccagccagccgccccgtccgggagggaggtggggggtcagcctccccgcccggccagccgccccatctgggagggaggtgggggggtcagctcccccgcccggccagccgccccgtccgggaggtggggggcacctctgcccggccgcccctactgggaagtgaggagccccctctgcccggccaccaccccgtctgggaggtgtacccaacagctcattgagaacgggccatgatgacaatggcggttttgtggaatagaaaagggggaaacgtggggaaaagattgagaaatcggatggttgctgtgtctgtgtagaaagaagtagacatgggagacttttcattttgttctgtactaagaaaaattcttctgccttgggatcctgttgatctatgaccttacccccaatcctgtgctctctgaaacatgtgctgtgtccactcagggttaaatggaaaaaaaaaaaaaaaaaagaaaccaggagttggcaattacttttttttttttaaagacagagtcttgctctgtcacccaggctgaagtgcagtggtgagatcttggctcactgcaacctccacctcccaagttcaagtgattctcatgcctcagccttcagagtaactgggattacaggtgtatgccaccatacctggcaaatttttaaatttttagtagagatgagcttttgctattttgtctaggttggtttcaaaattctgaccttgggtgatccacctttctctgcctcccaaagggcttggattacaggtgttagccatcatgaccagccagcaatttactgctaaaaaagctttgttatcttagggatcaggaaaagctgtgttgcgtaactgtaacacaatctttctatgtggctctttacattgtttttacctgggcattgcacacagttaacccatttataaattttctgcaagtgtattttggtcagtatgtttttgttacatgtatatgtctataaaagaattagggcctgtggtattttgctgtgccatcttgcttatgtagtttgtacaattttataggttagattagtgaagtatatttatctgagtctagcaactggagtaatttgttatttttatttctttcagttacgtgttctcattttgctcaagacctgtggccagagcagggcatgaaagattccttccaaaacttgataccgagaacatatgcaaagtgtggagatgagaatttacaactaagaaaaaactgcaaaagtgtggatgatggtaggatgcacaaaggaggttataatggatgcaatcaatgtttgacatcgacccagagcaaaatatttcgtggtgataaatatgtgaaagtcttttataaatatccaaattcaaataataataaaataagatatactgaaaaaattctttcaaatgtaaataatgtggcaaatcattttgcatgctttcacacctaactcaacataagaaaattcatactagagagaattcctacacatgtgaagaatgtagcaaagtctttaaatgttcatgaccctcactcaacataaaagaattcacactaaaaagacactgttcaaatgtgaagaatgtggcaaagcttttaaacagtcctcaaatcttactgaacataagagaattcctactagagagaaacactacaaatgtgaagaatttggcaaagattttaagtggtcttcaaatcttcctgaaaatgagataattcatattggagaaaaaccttgtaaatgtgaagaatgtggcaaaacttttaagtggtcttcaaacattactggacataagataattcatactggagagaaactatacaaatgtgaagaatgtggcaaagccttttactcctcctcaaaccttactttacataaaatgattcatactgcagagaaaacctacaaatgtaaagaatgtggcaaatcttttagccagtactcacaccttactacccataagggaattcatactggaaagaaaacctacaaatgtaaagaatgtggcagagcttataagtggtcctcaaaccttactgaacataagataactcagaactggagagaaaccctacaaatgtgaagaatgtagcaaagcctttaactggtccttacaccttgctgtacataagataattcatactgaagagaaaccctacaaatgtgaagaatgtggcaaagcctttaaatggtcctcaaaccttactaagcataagataatttatactggagagaaactctagaatttgaagaatgtggcaatgcttttaagtggtcctcaaaacttactgaacagctttcgggtgatgacaaccttcccacaagaggacatgcctctcacaaaggatctccttcatccctctccagaagagaagaggaaacacaagaagaaacgcctggtgcagagccccaattcctacttcatggatgtgaaatgcccaggatgctataaagtcaccacggtctttagtcatgcacaaatggtagttttgtgtgttggctgctccactgtcctctgccagcctacaggaggaaaagcaaggcttacagaaggatgttccttcaggaggaagcagcactaaaagcactctgaatcaagatgagtgggaaaccatctcaataaacacattttggattaaaaaaaacttactgaacgtaagataattcatacttgagaaaacctacaaatgtgaagaatgtagcaaagcttttactcatctctcaatccatgctaaacataaaataatttatgctggagagaaaacttacaaatgtaaagaatgtggcaaagcctgtaaccattcctcacatcttactacacgtaagtcatactgaagagaaattacaaatgtgaagaatgtggcaaagcctttaataagtccccagatcatacttgagaaaaacttcacaaacctgaaagatgtgacaatgcttttgacaacacctcaaacctttctaaacataaaagaaatcatactggtgagaaagtctaaaaatgtgaggaatatgacaaagtctttaaatggtagtcatgcttaattgtaggtaagataattcatactggagaaaacttctacaagtgtgaagaatgtggcaaaacctttaaccaatgctcacaccttattgcacaggaaaccatttatatttgagaaaaattgtataaatttaaagactatagaaaagccattgatatctgctcacatcttactcaacatcagagagttcatacttaataaaagcattataaatgcaattactcttaaaaggtctttcagaaaatataagcctataatgtgaaaaagtatttattctgaggacaaaccttacaaatataaaaaggattgtagtgtagcaggatgagccacagacaaaactcctcagacactgcgttaaagaaggaaggggtttattctgcagggggtattggcaagactcctgtctcaagagccgagctccctgagtgagcaattcctgtcccttttaagggctcacaactctaagggtgtgcacgtgagagggtcatgattgagcaagcagggggtagatgactgggggctgcatgcatcggtaattagatcggaacaaaacaggatagggattttcacagtgcttttctatacaatgtctgtaatctatagataacataactgattaggtcaggggtcaatctttaactaccaggcccagggtgtggcaccgagctgtctgctcgtggatttcatttctgccttttagtttttactttgtctttctttggaggcagaaagtgggcttaaaacaatatgaggggtggtctcctcccttagtagtacctttacttgtatcacagatcttattgtatatatttcatactagaggaaaaccctaaagaagttgctcaaactttgttcaatatcaggaaatttatactggagaaaaaccctgcaaatgtaatgaatttgaaagaaacacatttcaaaaactacagcttagaaaacatcatagagtttatactaagatatatttttgtaaatgaagtaaatataaaaaatacttcaaaactaactttatgtaaatcacagagaatacacagtagaaataaggcacttactcttcagacattacattaaatcagagagttgagtatagaaaataatcccaaactaaaattatttgataagttattagtatataactttaaaagaagtagaagattttttgtagggttataattacattcaaagtatacttttttattattacagatttttttgaaaagcaaataatgatgtaatttaactctcaaattacttcatgctctccattcctattgtatttacatgtgaaagcatgtgatcaaatattactgcattacagatataagagattcttttttattacgtaggcattatttatgaccttttccatggaagagtaagaacattaaaatataaaacacataatgaaaatttaagtagagaggctcattatggttaacttataatgttaagtgatgtatgaggtaggtgttctgagtaatatttttgtccactatagtgaaaaaaactttttaagttttagttaaaattaattaaattagcagtaacttattaattgtacttttatgtaatatgcagtacatttaaaaatttttcagttatatgtgaatttaattttctagtaaaacattgtttaaaatgtaacatctattgtacattcaatgaagtgttttttttttttttttttgagatggcgtcccactctgtcacccaggctggagtgtggtggcatgatcttggcacactgtaacctccgcctcccaggttcaagcaattctcctgcctcagcctcccaagtagctgggattacaggcacttgccaccatgcccagctaatttttgtatttttagtagagatggggactcaccatgttggccaggctggtctcaaactcctcacctcaagtgatccacataaatggcatattttggtacaggcatataatatgtaataacgacattagagtacatgaggtatccatcaccactagtatttgttctttgtattacaaacaatccaattctacacctttagctatttttaaatgtacaattgttattgagtacaggataaattttatggtcataattaaaattatataaataaaattcatacatatctgagtcctaaaaaaaactttcaaaaatttgttttttatatatatatatttttcaacatgtggcaactctgcctgcaaacacatacatacagaattttagttttgatttcaatcaggttaaatatacacatatattattttaaagataacactaggtatatgcaaattatgatgaatgtgtgtgtaagtatgagtcagggcatattttcagaagaaaacaataaatttttttttttttttgagacagaatatcgctctgtcgcccaggctggagtgcagtggagcgatctctgctcactgcaagctcctcctcctgggttcacgccattctcctgcctcagcctcccaagtagctgggactacaggcacccgccaccacgcctggctaattttttgtatttttagtagatatggggtttcaccatgttagccaggatggtctcgatctcctaacctcgtgatccacctgcctcggcctcccaaagtgttgggattacaggtgtgagccaccatgcccagccataaatttttttattaaggcgactaatttagtagaaaactaaaaacctaaaaaatgtggaaagcaattctatactgtctgctttgtattgaattctttaaaattgtatggcttatggttcagagtctccccatgcaatttgcctggttttacttgcttggtactctttgctagacccataattttcttgtttcttattttttttgttttgtagtttatgcagtattcattatgtgagctggtcagggattataatgatttttatgaaatttaatagtgcacacaaaataatttgtagatgtaattttacaattagtgtatgaagttatgttttatttaattagaagattccattctgttcttttacttggagaatactatataagcccacttttatttagttactgttcctttcagattttaaaattgtcataagttaatttatttatttattgagcaaatttgttcaggtaagtactagggtggcttccataagtcaagaggatgtttttgtatataaatgcagcaaatgaacatggcagtgcttgctgtgtagcagatgcttcatgataagccataagtattcctcctggagttagtttgtaacttcaagtcagagagagaaaatatcaatggtgaagaaataacgttgatttgtcatgtgaagaggattttttttttttttttttttggctgcacagctgactcttgctgaatttaaagagaaaatctgctttttttatttttatttttgagatagagtttcgctcttgttacccaggctggagcacaaggcatgatctcggctcactgcaacctctgtctctcgggttcaagcgattctcttgcctcagcctcccgagtagctgggattacaggtatgtgccaccatgcctggctaattttgtatttttagtagagatgggatttctccatgttggtcaggctggtctcgaactcccgacctcaggtgatccacctgccttggcctcccaaagtgctgggattacaggtgtgagccactgcgcctggccaattctacttcttatattaccaaattatctcatgtttgtttgtctcattatcggcattccaactatgtatgcatcacagacctttttttttctgtgttacagctacagtatcctcactgttgtcttcatgccatgtcatttcacactgtactttgtaggttttgataaggaagttggtattttagtaatgcactgaaaaattagttttaactgaagaattagcttatcaatataactttcatatcagttaattaagaggcggctgggcacggtggctcatgcctgtaatcccagcactttgggaggctgaagtgggtggatcatgaggtcagaattcaaggccagcctggccaagatgctgaaaccctgtctctactaaaatacaaaaattagcccggcatggtggcaggtgcctgtaatcccagctactcgggaggctgtggcaggagaatcgcttgaaccccagggggcagaggttgcagtgagccgagatcgcgccactgcattccagtctgggcaacagagtgagactctgtctcaaaacaaaacaaaacaaaacaagcaaacaaacaaaaaatgcattcactgtccacaggtgagagaaataaatcagttagcactgtttttctttgtaacagaaaaatctcattagattcttacacaaagtgtaaatataaaatttgttagaaaatatatcttacaaattaagtttttaagacttattcacaagtaaaaaagttttaatttaattttttatgatatagcacaacttatgttctcatgcagaatcttttgtctttaagtgataatgttaaattttgcaaaataataaaatgaaccctgtggatttgaaattcaaaataatatttctgtttcatattgatattacaattttgaggagtttctcttattgtatataagatttttagtggatgaagttcagtctacagtttttattcttcgtcacctaactgtagccaacaccttgctcatttttttttttttctggaaaaaattttaaagatcatagcagctttttgattaaaacattttccgttattttgcacgcaaacttgtttactgtattcacagagtgccctgttatgggaccataagcaacacctgctttcttagtgtcttttatacctttattatcagcaccaaaaacttcatgtgccctcaagcttaaaataaaagccctaatgtacattggcttctcccatgcactgtgctgggttcagaacatgctgataaatatcagagtttctgtgattgtgactgagaaattaaatggcaggagcagcacagaaaccatatgtttttgatactatttagccaaatcaatgacaaagagacagtattttacacactggtattcttctgtaatatttttaaaatatctttttaacttgacagataagcatatttattctgtaaaacatgatgttttaaagtatatatacattgttaaatgcttaattttaggtaattaatgcttcacctcacatagttaaaatttttatggtgagaccacattgacattgtcttagcattttaaaaaaatataataaattattatttttttcttattttatgttccagagtagatgtgcaagtttgttacataggtgaatgtgttacataggtaaatgtgtgccatggtggttagctgcacctatcaacccatcacctaagtattaagcccggtgtgcattagctgtttttcctgatgctcttcctaccctgccctctcctgacaggcctcagtgtgtgttgcttctctcctggtgtccatgtgttcttattgtttagcttgcacttacaagtgagaacaggacgtgttttgccttctgttcttgtgatagtttgctgaggataatggcttcgagcttcattcatgtctctgtgaaggacataatctcactacttttcatggctgtatagtattacattgtttatatgtaccaagtattctttaactagtctatcattaatgggcatttgggttgatatcatgtttttgctattgtgaatagtgcagcaatgaacatacacatgcatgtatctttataatagaatgatttatattatttttagtatataccaaggaatggagttgctgggtcaaatggtgtttctggttttaaatctttcaggaattgccacactgtcttttctaataattgaactaatttacattcctaccaacagtatataagcattcctgtttctctgcaacatagccagcatctgttgtttcttgactttttaataaccaccattctgactgacatgaaatggtatctcattgtggttttgatttgcatttctctgatgattagtgatggtgagctttttctcacaggtttgttagctacatgtatgtcttcttttgaaaagtgtttgttcagccaggtgcagtggctcacgcctgtaatctcagcactttgggaggccgagggtggggggggggtcagaccatgaggtcaggagttcgagaccagcctgactaacgtggtgaaaccctgtatctactaaaaatacaaaacttagctaggcgtggtggcacatgcctgtagtcccagctattcaggaggctgaggcaggagaatcacttgaacccaggaggaggaggttgcagtgagccaagatcatgccactgcactccagcctgggtgacagcaagactccatctcaagaaagaataaagtgttcatgttctttgcccagttttttatagggttgtttgttttttttcttataaatttgtgtaagttccctctagattctggatattagacctttgtaagatagattgcaaaaattttctccttttctgtaggttgtctgtttggtctgatgatagtttctttttatgtgcagaagctctttagtttaattagatcctaattcatcaatttttgctttttgtgcaaatgcttctgatgattttatcataaaatatttccccatgcctatgtcctcaattgcattgcctagattcttttccagggttcttatagttttgggcttatatttaagtcttcaattcagcttgagttattttctatgagatataaggaagaggtccagtttcaattttctacatatggctagccagttctcccagcatgatttattaaatagaaaaaaattttttccattgcttgtttttgtcaagtttgttgaagatcagatggttgtagacacgcagttttatttctcatttctctattctgttctatgtggcctatgtgtctgtttttgaaatggtaccattcttgttttagttactgtagccttgtagtatactttgaagtcaggtaatgtaatgccttcagctctgttctttttgcctaagattgtcctggctatatgggctattttgtttgtttgtttgtttgtttgttttgagacagagtctcaccctgtcacccaggctggagtgcaatggtgctatctcagctcactgcaatctccgcctcctgggttcaagtgattctcctgccccagcctcctgagtagctgggaattcagatgcccacaactatgcccagctaatttttgtatttttagtagagatgagatatcatcatgttagactggtctcaaactcctgacctcaggtgatctgcctgcctcggcctcccaaagtgctgggattacaggtgtgagccatcacacccagtctatgggctcttttttggttccatacaaattttaatatagcttttcctaattctgtgaagaatgtcaatggtagtttaatgggaataccattgaatctataaattactttgaacagtatggccattttcacaatattgattcttcctatccatgtgcatagaatgttttttcatctgtttttgtcctctaatttccttgagcagtgttttgtagttctccttaaggaggtctttcactttccttgttagctgtattcctaggtactttattctttttgtggcaattgtgaatgggatttcattcacaatttggctctctgcttgtctgttggtgcacaggaatgcttgtaatttctgcacatttagtctgtatactgagactttgctgaagtagtcttatcagcttaagaagcttttgaactgagtaaatagggttttctaaatataggatcacatcatctgaaaacaaagacaatttgacttactctattccagtatgaaaattattttttatccttgcctgattgccctgaccagaacttccaataatatgttcaataagaatggtgagagagtgcattcttgccttgcactggtttccaaggggaaatgtttccagtttttacccagtcagtatgatattggctgcagggtttgtcataaatggcccttattattttgaggtatgttccttcaatacctagtttattaagagttttttatttgttgttgttgttttgagacagagtttcactcttgttgcccaggctggagtgcaatggtgctatcttggctcactgcaacctccacctcctgggtttaagcgattctcctgcctcagcctcccgagtagctgggattacaggcatgtgccactacacccggctaattttatatttttagtagagacggggtttctccatgttggtcaggctggtctcaaactcccgacctcatgtgatccacccacctctgcctcccaaagtgctgggattacaggtgtgaggcaccacacctggcctatgaagagtttttaacatgaagggatgttgaattttattgatggactttcctgcatctattgagataatcatgtgggttctttttttttttttttttagatctgcttatatgatgaattacattttttttttttagatctgcttatatgatgaattacatttattgatttgcatatgttgaaccagccttgcatcttgggaatgaagccaacttgatcatggtggatgagctttttgatgtgctggtgtattcagtttgcaagtattttattgataatttctgcattgatgttaattagtgataatatcctgaagttttcattttttgttgtatctctgccaggtttttgtatcaggatgatgctggcctcatacaatgtgttagggagaagtccctcctttttaattttttggaatagtgcataagaaagggtatcaacacctttttgtagttctggtagaattcagctgtaaattcatctggtcctgggctttttcttgttggtaggctattattgctccaatttcagaatttgttattggtctattcagggattcaacttctttctggttcagtctgaggagggtgtatttgttcaggagtttatccatttcttctaggttttctagtttatttgcatagaggtgtttatagtattatctgatggttatttgtatttctgcagggtaagtggtggtatcccccttctcatttctgattatgtttatttgaatcttctctcttctcttatttagtagtttagctagcaatctatctattttattgattttttttcaataaatctgcttctgaattcattaattttttgagtaatttttaatgtttctatctttcatagttccactctgagcttggttatttcttctgctagctctggggtttgtttgctcttggttctctagttcttttagctgtgatgttaggatttcaatttgagatctttctagctttttgatatgggcatttagtgctataaattttcctcttaaactgctttacctgtgtcccagaaattctggtatgttgtatctttgttctcattagtttcagaatttttttaatttctgccttaatctcattatatacccagaagtcattcaggagcaatttgttcaatttccttgtagttgtgtggttttaagtgagtttttaaatcttgagttataattcgattgcactgtggtctgagagactgttatgattttagttattttgcattttctaaggagtgtttcacttctaattatgtagtatattttagagtgagtgccatgtggcaccaagaaaaatgtatattatgttgtttttgtggggagagttctgtagatatctatcaggttcacttgatccagagctgagttcaagtcctgattatctttgttcattttctgtctcaatgaactgtctaatattgacactggggtattaaagtctcccactatttggccaggcgtggtggctcacaagtgctgtaatcccagcactttgggaggccgaggcaggtggatcacaaggtcaggagattgagaccatcctggctaacatggtgaaaccccatctctactaaaaaaaaaaaaaaaaaaatacaaaaaattagccaggcatggtggcgggtgcctgtactcctagctactcaggaggctaaggcaggagaatggtgtgaatctgggaggtggaacttgcagtgagctgagatcgcaccattgcactccagcctgggtgacagagtgagactctgtctcaaaaaaaataaataaataataaagtctcccattattattgtgggggagtctaagtctctttgtaggtttttgagaacttgttttatgaatctgcgtgcttctgtaatggttgcatatatatttaggatagttggcactttgtgttgaattgaaccatattctgttatgtaatgatcttttttttacctttgttggtttaaagtctattttgtcagaaacaaggattgcatctcctccttttttctgctttccatttgcttggtaaattcttttccatccctttattttgaacctatgtgttctctgcacatgaaatgtgtctcttgaatacagcacagtgatgagtcttgtctttttatccagcttgccattctgtgtcttttaactggggcatttagctcatttacatttaaagttaatattgttatatgtgaatttgatcctgtcatcatgatgctggctggttaattttgcagacttgttaatgtagttgcttcagtgttattggtctgtgtacttcaatgtctttttatggtgggtggtaacggatttcctttccatgtttagtgcttccttcaagagtttttgcaaggcaggatgaaatccttggtcattagcttgtctgcaaaggattttatttcttctttacttatgaagcttagtttggccagatatgtattctgggttgaaaattcttttcattaagaatgttgaatattggtccccaatctcttctggcttgtagggtttccactgagaggtttgctgttagtctgatgagcttccctttgttggtgacctggtctttctctctggctgcccttaactttttttttttatttcaaccttggagaatctgatgattatgtttttggggtggatggttcatggagtatcttattagggttctctggattttctggatttgaatgttggcctgtcttgccaggttggggaagttctcctggatgatctcctgaagtgtgttttccaacttggttccattctccccatctcttttaggtatgccagtcatttgcaggtttggtctttttacatagttccatagttctcagagtttttgttcattcctctttatttttttccctctaatcttgtctgcttgccttattgcagcaagatagtcttcgagtgctcacagtctttctttctcttggtcaattcagctattgatacttgtgtttgcatcatgcagttctcatgctctgtttttcagctccattggatcatttatgtttctttttaaactggttatctagttaacaactcctgtaatcttttattatggtccttagcttctttgaattgggttacaacataatcctttagctcagtgaagttcattattgcttactcacctcctgaagcctacttttgtcagttcatttatctgagcttcagccgagttctgtgtccttgctggagaggtttttttgcgatctattggagaagacgcattctggcttttggaattgtaagcatatttgcattggtttttcctcatctttgtggatttatctacctttgagatttgaatgaggttttttgtggtcgtcttgatgttgctgcttttttctctcttttttaacagtcttctcttctgcaggtctgctgcagtttgctgggggtcagtccactccagatgctgttcacctgggtatcaccagtgaaggctgcggaacagcaaagattgccacctgctccttcctctggaagcttcttcccctggaagcttcttcccacagggacactgacctgatgccagcctgaactctcctgtatgaggtgtcgggaacccctgttgggaggtctcacccagtcaggaggcacagattcaggaactgatttaaagaagcagattggatgctcctcactggtgtcagtgtattgtgctgtggggaatctccctcgtccagatcatcaggacacttcagagccagcaggcagaaaagattatacccactgaaccttagattatgaccgcccctcccccaggtgctctgacccagagagatgaaagttctgtctgtaaacttacagctgaagttcctggaatttgtccagggagactctgcccagtaaggacagatgtatccgtttcccacttaaagaagcagtctggccatgatctgccacagccactgtggctgtgctctggggactttcgcccagtccaaacctcagtctgtctaccactggcagaggaaaactaccaactagagtcacagttacggcagtcacctgtctctccaaaataaacttggttgcattatgcatacttcaggctgctttgctggccagcaggcattccaatccagtggtcttaccttgtggtattcaatgggagtgggatctgctgagtgagaccgcttggcacactggctttagtccccttcccacataagtgaatgaatctcctgcctcatgagttctggaagccactggagtttgcaaaaattcctgcaactaagtgcctgcctgaatggccgctgaccttagcagctgccacaggtccacacagctttgtgcttggaatgcaagggcctgttagtgtgggagcaaaagggactctcctaaaccacaaattgcaaaaatccataggaaaagtgtagtttttcacctgggtaacataatctctcactgcgtttctcggctgggggagggagttccctttcaccctgtgcaggtcctgggtgaactgtggccccaccctgctttttcttgttctctgtggtcacaccaactgcctagtcagttccagtgagagaatctaggtacttcagttagaaatgccgaattcacctgctgtttaaattcggtgggagttgcagaccggagctgtttctacttggccatctgggcccttcccaatataacacattattattaactatagacaccatgctgtacaatatatctcttgaatgtattcctcctatccaactataattatgtattgtctgacagacatcttcccaaacacccctttcttttaaattccttgggatctggtggtcaccattttactctctgcttcaatgaaattaagttttatagaatccatgtgtaggcgaaagtatgaaattttaatctttctgtgcctggcttatttcaagaaatataatgttctccaagttaatccatgtaattgaacataatagaattttcttttttaaaaataaatagtattttattgtgtgtatataccatactgtctttatttactcattagatgttgaactgttgcttctatattttggctgttgtgaagagtgttgcaaacaacagagaggtgcaaatgtttcttcattctcactttatttctcttaaatatatatgcaatagtgaaattgctgtattatagggtagtttgattttaaattttttgagaaatctctactttgtttttcttaatggctggcctcatttacattcacatcaacagtgtgcaagcattctcttcacatatttatcttttttttttctttttctttctaataggagtcattctaataagagcgagttgatatattatagattttttggctctcctctccctgataataattgacattgagggttttttttttttttttcgctgagtttcactctgttgcccagactggagtgcagtgtcacactctctgctcactgcagcctctgcctcccgggttcagcaattctcctgcctcagtctcccgagtagctgggattacaggtgcccaccaccatgcccagctaatttttgtatttttagtagaaactgagtttcgccatgttggccaggctagtctcaaactcctgacctcaagtgacccacctgccttggcctcccaaagtgctgggattacaggcatgagccactgcactcgggccacattgagaattttttaatatatctattggccatatgtatcttttcttaaaaaatatttaagccctttgctcattttagtagttatttgttttttgttgtatagtcatttgagtttcttacatattcttaatattaaccccttgtcaaatgtataaattgcaaaaaaaaattttagttttctcattttaagtgtgtcagattctgcacagcagctttataatttgaactaatcttactcatctattttttattttgttccctgggattttgagtttaaatcaaaaaaagttacagcccagactgatgttatggggctttcagtctatattttttgtagtagtctcagagtttcaggccttgcatttaagaatttatttgatttttatatatgaagtaagatgagggttgcattttattgctctgcatgttgctattaagtttttctcagcgccatttattgaagatactgttctttttctaagaaattgttacctttatctaaaatcagttagctggaagtacacagatatatttctaatttcccttttctgctccattggcctatgtgtctgttttttgttcaagtaccatactgttttatttgctttagctttgtagtatatttctttttttcttattattattatattttaagttttagggtacatgtgcacaacgtgcaggttagttacatatgtatacatgtgccatgctggtgtgctggctttgcagtatacttcaaagtcagatagggtgataacttctgtctttcttatttgctggagttctttgactattcagagtcttttgtggtaccataaaattttaaattttttaaaattttctattaaatatgtcaccggtattttgatagaggttgcattgtatctgtacatcattttgtgtaataaacatatttaacaatattaataactccaatgatgaatgagtaatgttttccatttgcatatgattttattttaatgttctttagattataatgtacaaatgtttcaactttttagttaaatttatttcaagttatagttactacagttagtgtagatgagattgttttgcattataatttcattttgagataattataagtgtatagaaatgctactgacaaattggcacctaattaaactaaagggcttctgcacagcaaaacaaactattgacaaacagacaacctaaagtataaaataaaatatttgcaagctgaatacaacataagattaatatatagaatctataagaaacttaatcagaaaaaagcaaatgatctaaatagacagtactcaaagaaagatataaaagctgttaatagggcagttccaagatagccgaacaggaacagctccagtctacagctcccagcatgagcgatgcagaaggtgggtgctttctgcatttccaactgaggcactgggttcatctcactggggattgtcggacagtgggtgcagcacactgagcatgagccaaagcagggcaaggcatcacctcacctgggaagtgcaaggggccagggaattccctttcctagccaagggaagcggtgacaaacagcacctggaaaatcaggtcactcccaccataacactgtgcttttccaatggtcttagcaaatggcacaccaggagattatatcctgtgcatggctcagagggtcctacacccacggatcctcgctcattgctaccacagcagtctgagatcgaactgcaaggtagcagcaaggctgggggaggggcgcccaccattgctgaggcttgagtaggtaaacaagtggctgggaagatcgaactggctggagcccaccactgctcaaggaggcctgcctacctctgtagactccacctctgggggcagggcatagccaaacaaaaggcagcagaaacctccacagacttaaatgtccctgtatgacagcttggaagagagtagtggttctcccagcacggagcttgagatctgagaatggacagactgcattctcacgtgggtcccagacccccaagtagcctaactgggaggcatcccccagtaggggcagactgacacctcacacagccaggtagccctctgagacaaaacttccacaggaatgatcaggcagcaatatttgctgttcaccaatattcgctgttctgcagcctccactgctgtcacccagcaaatgaggtctggagtggacctccggcaaactccacctgacctgcagctgaggatcctgatggttagaaggaaaactaacaaacagaaaggacatccacaccaaaaccccatctgtaagtcaccatcatcaaagaccaaaggtagataaaaccacaaagatggggaaaaaacagagcagaaaaactgaaaattctaaaaatctgagcacctctcctcctccaaaggaatgcagctcctcaccagcaatggaacaaagctggatggagaatgactttgacgagttgagagaagaaggttccagacgatcaaacttctctgagctaaaggaggaagtttgaacccatggcaaagaagttaaacaccttgaaaaaagattagacgaatggctaactaaaataaccaacgcagagaagtccttaaaagacctgatggagctgaaaaccatggcaagagaactacgtgatgaatgcacaagcttcagtagcagatttgatcaactggaagaaagggtatcagtgatggaagatcaaatgaatgaaatgaagtgagaagagcagtttagagaaaaaagaataaaaagaaacaaagcctccaagaaatatgggactatgtgaaaagaccaaatctacgtctgattggtgtacctgaaagtgacggggagaatggaaccaagttggaaaacactctgcaggatattatccaggagaacttccccaatctagcaaggcaggccaacattcagattcaggaaatacagagaaggccacaaagatactcctcgagaagagcaactccaagacacataattgtcagattcaccaaagttgaaatgaaggaaaaaatgttaagggcagccagggagaaagatcgggttacccacaaagggaagcccatcagactaacagcggatctctcagcagatactctagaagccagaagagagtggggaccaatattcaacattcttaaagaaaagaattttcaacccagaatttcatatccagccaaactaagcttcataagtgaaggagaaataaaatcctttacacacaagcaaatgctgagagattttgtcaccatcaggcctgccctacaagagctcctgaaggaagcactaaacatggaaaggaataagaggtaccagccactgcaaaaacatgccaaattgtaaagaccatcaatgctaggaagaaactacatcaactaacgagcaaaataaccagctaacatcataatgacaggatcaaattcacacgtaacaatattaaccttaaatgtaaatgggctaaatgctccaattaaaagacacagactggcaaattggataaagagtcaagacccatcagtgtgctgtattcaggaaacccatctcatgtgcagagacacacataggctgaaaataaagggatggaggaagatctaccaagcaaatagaaaacaaaaaaaggcaggggttgcaatcctagtctctgataaaacagactttaaaccaacaaagatcaaaagagacaaagaaggccattacataatggtaaagtgatcaattcaacaagaagagctaactctcttaaatatatatgaacccaatacaatacaggagcacccatattcataaagcaagtccttagagacctacaaagagacttagactcccacacaataataatgcgagactttaatacctcactgtcaacattagacagatcaacgagacagaaagttaacaaggatatccaggaattgaactcagctctgcaccaagcagacctaatagacatctacagaactttccaccccaaatcaacagaatatacattcttcttagcaccacactgcacttattccaaaattgaccacatagttggaagtaaagctctcctcagcaaatgtaaaagaacagaaattataacaaactgtctctcagaccacagtgcaatcaaactagaactcaggaataagaaactcactcaaaaccactccaactacatggaaactgaacaacgtgctcctgaatgactactgggtacataatgaaatgaagacagaaataaagatattctttgaaaccaacgagaccaaagacacaacatgccagaatctctgggacacattgaaagtagtgtgtagacggaaatttatagcgctaaatggccacaagagaaagcaggaaagatctaaaattgacaccctaacatcacaattaaaagaactagagaagcaagagcaaacacattcaaaagttagcagatggcaagaaataactaagatcagagcagaactgaaggagatagagacacaaaaaaaaccttcaaaaaatcaacgaatccaggagctggttttttgaaaagagcaacaaaattgatagaccactagcaagactaataaagaagaaaagagagaagaatcaaatagatgcaataaaaaatgataaacgggttttttgaaaagatcaaaaaaattgatagaccactagcaagactaacaaagaagaaaagagagaagaataaaatagacgcaataaaaaatgataaaggggatatcaccaccaatcccacggaaatacaaactaccatcagagaatactataaacacctctacccaaataaactagaaaatctagaagaaatggataaattccttgacacatacactctcccaagactaaaccagcaagaagttgaatctctgaatagaccaaaacaggctctgaaattgaggcaataattaataacttaccaaccaaaaaaagtccaggaccagacggattcacagccgaattcttccagaggtacaaggaggagctggtaccattccttctgaaactattccaatcaatagaaaaagagggaatcctccctaactcattttatgaggccagcatcatcctgataccaaagcctggcagagacacaacaaaaaaagagaattttagaccaatatctctgatgaacatcgatgcaaaaattctcaataaaatactggcaaacccaatccagcagcacatcaaaaagcttatccaccatgatcaagtgggcttcatccctgggatgcaaggctggttcaacatacacaaatcaataaacgtaatccatcatataaacagaaccaaagacaaaaaccacatgattatctcaatagatgcagaaaaggcctttgacaaaattcaacaacccttcatgctaaaaactctcaataaattaggtattgatgggacatatctcaaaataataacagctatctatgacaaacccacagccaatatcatactgaatggacaaaaactggaagcattccctttgaaaactggcacaagacagggatgtcctctctcaccgctcctattcaacatagtgttggaagttctggcgagagcaatcaggcaggagaaagaaataaagggtattcaattaagaaaagagggagtcaaattgtccctgtttgcagatgacatgattgtatatctagaaaaccccatcgtctcagcccaaaatctccttaagctgacaagcaaattcagcaaagtctcaggatacaaaatcaatgtgcaaaaatcacaagcattcttatacaccagtaacagacaaacagagagccaaatcatgagtgaactcccattcacaattgcttcaaagagaataaaatacctaggaatccaacttacaagggatgtgaaggacctcttcaaggagaactacaaaccactgttcaatgaaataaaaaaggatacaaacaaatggaagaacattccatgctcatggataggaaggatcaatatcatgaaaatggctatactgcccaaggtaatttatagattcaatgccatccccaacaagctaccaatgactttcttcacagaattggaaaaaacgactttaaagttcatatggaaccaaaaaaagagcccacattgccaagtcaatcctaagccaaaagaacaaagctggaggcatcacactacctgacttcaaactatactacaaggctacagtaaccaaaacagcatagtacttgtaccaaaacagacatacagaccaatggaacagaacagagccctcagaaataatgccacacatctacaactatctgatatttgacaaacctgacaaaaaaagaaatggggaaaggattccctatttaacaaattgtgctgggaaaactggctagccatatgtagaaagctgaaactggatcccttccttacaccttatactaaaattaattcaagatggattaaagacttaaatgttagacctaaaaccataaaaaccctagaagaaaataaaggcaataccattcaggacataggcatgggcaaggacttcatgtctaaaacaccaaaagcaatggcaacaaaagccaaaattgacaaatgggatctaattaaactaaagagcttctgcacagcaaaagaaactaccatcagagtgaacaggcaacctacagaatgggagaaaatttttgcaatctactcatcgacaaagggctaatatccagaatctacaaagaactccaacaaatttacaagaaaaaacaaacaaccccatcaacaaatgggtgaaggatatgaacagacacttctcaaaagaagatatttatgcagccaacagacaatgaaaaaatgctcagcatcactggccatcagagaaatgcaaatcaaaaccacaatgagataccatctcacaccagttagaatggcgaccattaaaaagtcaggaaacaacaggtgctggagaggatgtggagaaataggaacacttttactctcttggtaggactataaactagttcaacctttgtggaagacagtgtggtgattcctcagggatctagaactagaaataccatttgacccagccatcccattacgggatatacacccaaaggattataaatcatgctgctataaagacacatgcacaagtatgtttattgtggcactattcacaatagcaaagacctggaaccaaccctaatgtccaacaatgagagactggattaagaaaatatggcacatatacaccatggaatactatgcagccataaaaaatgatgagttcatgtcctttgtagggacatggatgaagctggaaatcatcattgtcagcaaactatcgcaaggacaaaaaaccaaacattgcatgttctcactcataggtgggaattgaacaatgagaacacttggacacaggaagggggacatcacacaccggggcctgttgtggggtggggggaggagggagggatagcattaggagatacacctaatgtaaatgacaagttaatgggtgcagcacaccaacatggcatatgtatacatatgtaacaaacctgcacgttgtgcacatgtaccctagaacttaaagtataataattttaaaaaagctgttaataaacatgcaaaaaattgctaaacattcctaatagagagacataaatcaaaatgacaatgtcatatcatcccacatccgttagattggctgttgttagaaagtcaaaaaataacagatgtttaagttatggagaaaaggaaatcttgaaacactgtgaaaatgcaaattaattcagccccaatgaaaagcagtttggagatttctcaaagaactaagaatataattgccatttgacccatcagtcatattactgggtatatacccaaaggaaaaataaattattttatcaaaaagacacctgcattcatctgtttattactgcattattcacaatagcaaaaacataatttttttttgagacagagtcttgctcttgttgctcagcatggcacggtctcgactcactgcaacctccacctcccaggttcaagtgattctcctgcctcagcctcccaagtagctggcattacaggcacccaccaacacacctggctaatttttgtattttcagtagagatggggttttgccatgtcggccagactggtctcaaactcttgacctcgtgatccccccacctcggcatcccaaagcgctgggattacaggcatgagcctccacacctggccaaacaaaattaaattagatatccatacatcttaaattggatttttaaaaaatgaggtacttacacactgtgcaataatatgcagccacagaaaagaatgaaataatgttttttgcagcagcatgaatgcagaagaagaccattactttaggcaaattaacacagaacaggaaaatatcaacatgttctcatttatacgtgggagctaatcattgcatgtgcatggaaacaaagatggaaaaaataaacactggaaattctaaaaaaggaggaagggagacaaacattaaaaaactatgtatcaggtatgatgtacactacttgggcaatggaattatcaagtccccaaacctcaacatcatgcgctatgttacaggtctgcacctgtaccctctgaatctaacataaaaataatagaaagctctgtgataaaatgatatgtcacatttctccagttctgggttactagttgaaattaggagtgaaaaacagaattatgacccctttcgccataagggtgaatgtttctatgctcggtctccccatattctataaaccaacctctcagaaagctctaaacatatgtcccaagaagtgttgtatttccaagtgtgaaactaaaataaatgactctacatctttatttttaatgttttaactgttcactagactacagagttaatgtattaccctgctttattggggaaaaatgataagtggtttaatcacatttcttctttagaataaaccatttatgaaaatgtgaggctgtggaaatcatgctaaattactgaattggaaagagaaactgtttttgtaaagaacagcatagaagttttatagccatagcccaaatatgatgaaacagagtgtgggatatttaggaccacacagctactaaatgttcacttcatcacgacccttcttgtgaaaaaaggaataacgagtcagcaggtacttttagaatacttttctgattcttctgtagtgttaaattttttgtctttattatatgccatataaaagtctttacttccacaaaagatgccatgagttcaaagttaatatgctcacaaatatattctccctagaagggcactactctgtttgcagtcaaggtgtagcatttttggcctttttttttttttttttttttgctgatatgtttgtgtgaaataggcaggaagtaaagcaaagttaatcataacatttctagattctataactacagcatctgaaatctagcattatgtcaactagaaataatgacaatatttcaaagctgaaaaaataaattgataaatactttatatgtttatttttaatagtttataaaaatttatagtttctaaattataggttaaactagttgaacatgcagatacctaaaagttctatttggatgatagtattaatattttaatattttatgattgtgaatcactactgccttattgggttaactgtaaagcagttatttatcttctaaatgtaaacagagaagaggattttcataatcttaagcatacagatttattaagattagcactttgtttagatttgaataaaatttataggtttttagtaataaaaaatttagcagtttttctagtagaaataaaacagcaatataaatatgtttttaaaaatctgtttaaaagaaactttacatgtgtttgttaaataacatttaaaaccacattgcaagtgactgattagtaattccaatctttattttagtcactgagaaaacttagtatactttaattattcaatagaaaagagtattcttatattagtgttcctgaaactttcagaaactatagaccactcaatagatgatgatgtagatgcagaacacaaatgttctatataatagactcagcatttttttttttttttttttttgagatgaagtctagctctgtcgcccaggctggagtgcagtggcatgatctcggctcactgcaacctctgcctcccaggttcaagagattcccctgcctcagcctcccgagtagctgggattacaggcgcctgccaccacgcccggctaatttttgtacttttagtagagacagggtttcactgtgttggccaggcaggtctcaaacttctgatctcatgatccacccgtctcggcctcctaaagtgctgggattacaagcgtgagccaccgtgcctggcctcatcctagcttttaatataaacattcaaaagtaaaattaatggcctttttttttgagacagagtctcacttatcgccaggctggagtgtagtggtgccatctggactcactgcaacctccgcctcccgtgttcaagcgattctcctgcctcaaactcccaagtagctgggactacaggagcgcgccaccacgcccagctaatttttgtatttttagtagagacggggtttcaccatgttggccaggattgtctcgatctcttgacctcatgattcgcctgcctggacctcccaaagtcctgggattacaggcgtgagccactgcaccgggcccttttattttttattatttatttatttatttatttatttatttatttatttatttatttatttattgagacggagtctggctctgtcgccaggctggaatgatgcagtggtgcgatcttggctcactgcaacctccgccttccgggttcaagcaattctcctgcctcagcctcccgagtaactgggactacaggggcgtgccaccacgcccgcctaattttgtatttttagtagagatggggtttcaccatgtttgtcaggctggtctctaacacctgacctcaggtgatctgcccgcccaggcctcccaaagtactgggattacaggcttgagcccggccaattagtgtctcttttaagtcacgaaagggataacattgttagaatccatttaccaaagtatttgtgttaggcttagtaacaagaactctaaaccaaatatcagggtctacatactatctaagggtgaaaaaaaaaaacccttgttttaaaatttctctttatttctacgaagttagaaaattcaaagctaaaaatcttatgtcaggaataaaaacaagtattgggtgagagggtgttgggcctaatggtgaagattgaaactcattatcagggagttcctgattgcatctcactgatacaaagtgaagaaggtactgaaatagcgaaaaacagtgatataaattgagtacttacatataaaatacaatttttaataaaaagtagcatttaatgtacagctatagatgagaacttttggtcaaatattacctgccttcaatagaaataaaaaaaattattttgtatgtattttctttttttcttttttctttttttcttttttttttttttttttgagacggagtctcactttgtcaccccggctggagtgcagtggcaatctcggctcactgcaacctccgccacctgagttcaatcgattctcccatctcagctgcacaagtagctgggactacaggtgcatgccacagcccagctaacttttgtattttttagtagagacggggtttcaccatgttggccaggctggtctcaagctcctgaccttaagtgatcctcccttctcagcctcccaaagtattgagattatattcttgagccaccgccctcggccataaaaaaaattctttattttaccacaagcattttattattgatgcatatgcttattttgcttaaaatacagtatcttttgatgaaagacttatacttttctttcagtgtgttatttattgctgagaagtggctgtccggctaagaaactgctattctcagcaacaaccacattgactaatagtgaatggaagtgatgtgtggataagaagcaaatgtgtcttctctgcatctcttttttcatccattggctgaagaacgagaaagatgtagagagaaaatgaaagaagatgtaattcctaaaaaatgatgaagtcctcttttggtttttttgtttgttttttggttttcctttttttttttttttttttttttgggacttagtctcgctctgtcacccaggctggagatctcgactcactgcaacctcagcctcccgggttcaagcgattttcctgcctcagcctcgagagtagctgggactacaggctctgtgccaccgagcccagctactttttgtatttttagtaggacagggtttcaccgtgttagctaggatggtctcgatctcctgaccttgtgatctgcctgcctcagcctcccaaagtgctgggattacaggcgtgaaccaccgcgcctgcctttgaagtcctcttaacaacaacaaaaacttacacaggaggccgggagcagtggctcattcctctaattccagcactttgggaggccgaggtgggcagatcacctgaggtcaggggttcgagaccagcctggccaacatggcgaaaccccgtctctactaaaaatacaaaaattagctgggcgtggtggcacgtgtacctgtaatcccagctactcgggaggctgaggcaggagaatcacttgaaacccggaggcagaggttgcagtgagccgagatggtgccattgcactccagcctgggtaacaagagtggaactctgtctcagggaaaaataaactcacaggagatagtgacatgagtagaaaatatactattttgtgaatcatctgaaattgtaatatacaacccaaactgctttaacaaatatattattccttcagttctgactcatcaagatatgattcaattgcctggtgaatcaaagctgagatgataataacttattttacttagcataatgtcctcgaggttcatcaatattgtcgcaaatgacaatactttcttctttttaagggctaaatagcattctgtggtgtaaatataccacattttctatattcattcacctgttgaagaacacttggctcatacaatatcttagctactgtgagtaatcctctttcttctttttttaatttgtttttatatctcttttttctttacttttttaatttctagaagtattttaactttatttatttatttatttagagacgaagtttcgctcttgttgcccaggctggagtacaatagtgctaactttatttatttatttacagacgaagttttgctcttgttgcccaggctggagtgcaatagtgcgatctcagctcaccacaacctccgcctcctgggttcaagcgattctcctgcctcagcctcccaagtagctgggattacaggcatgtgccaccatgcccggctaatttttgtatttttagtagagacagggtttctccatgttggtcaggctggtctcgaactcctgacctcaggtgatccgctcacctcggtcccctaaagtgctgggattacaggcgtgagcaactgagccaggccattttaactttaaaatataaattgtgtcttttgaccaggcccggtggttcacgcctgtaatcccagcactttgggaggccgaggtgggtggatcacctgaggtcgggagctcaacctcccgacctgacacatggagaaaccccgtctctactaaaaatataattagctgggcgtggtgggcgcctgtagtcccagctactcaggaggctgaggcagaagaatcacttaaacccgggaagcagaggtagcgatgagctgagatagcgccattgcactccagcctgggcaacaagagcgaaactcagtgtcaaaaaaaaaagaaaagaaaagaaaagaaaagaaataaagaaacaaataaataaaaactctctgctctgcttaatcagcggtcaccttattttcacacttcaaaggcattttagctgcctgaaaagcagagttacagttcaagtgcgtgtgctgagctggtcctcaacagtgtcagtctattcaaattcacacagatgatcttctggtaaaaatagtgcagttcaacagcattaccacggcaatgtggaacacatgtaataaaataaaagttaggctgggcacggtggctcacgcctgtaatcccagcactttgggaggccgaggtgggcggatcacttgaggtcgggattcaaggccagcctgaccaacatggtgagacccccgtctctactaaaaatacaaaatattagccaggcatggtggcatgtgcctgtaatcccagctactcgggaggctgaggtggaagaatagcttgaacccaggaagtggaggttgcagtgggccaagatcacgccatcacactccagcttgggcgacagagtgagactccgtctcaaaaaaaaaaaaaaaaattctccaccacggatgtgttttttactgtcatcatgagtaaaagatcagtttgagaacaggtaaaatcaaaatgcgcatgctctctacagagaaattttcctactgcagatagctttgcttgaattacctgaaatacaatgtaaatgatggggcttattgagttgacaatatgcagtcaccattacagtcgccatggttgctgcatgctgaggacatggtcactttcttgactacctctcctatctcaataatacttgtctttatttattcctaactaccaactttgagataagattcaactgttacatcatcattgtcaacagtgggaaaatcaatttttttttttttttttgagacagagttgctcttgttgcccaggctggagtgcagtggcacgatctcagctcactgccacctccacctcctgggtttaagcaattatcctgcctcagcctcccgagtagctgggattacaggcatgtgccaccacgtctgtctaattttgtacttttagtatttttagtagagacaaggtttctccatgctggccaggctggtctcaaactcccgacctcaggtgatccgcccacctcagcctcccaaagtgctgggattacaggcgtgagccactgcacctggccgggaaaatcaaaattttaaaatcaaacatatttgagctagctttgggtcattagctgtgtgcccaagagaaattattttacatccttggagcttcaattttcattactagtaaaacattctatttttcacagggctgctttaattcacacctggtagctacaagtcttttcactgaaagtcttttttatatatgtatattaaatatttaacaataaaaataaaattattcatatttaaagatattctaattgagtgggtatattttgtcatatttaatgtatttatcctttctaaaaaataccaaaataagaattttattatttttcctggaataacatattaagggtgtctacattgtgactttgctcatttttgcatatggttttgactgctgctgttgaatttaggctgaattttaaacccactgttgtctagcttgtgtgattttagttcatttggggaaccaaatatattagacatggattgtttggggtaacttggcttcatttctactgtctttctgttattacatctgaagatttagaaatgactaggattcaaataaggttgatttggaatcaggcacagaaaatcccagaaaagactgtggaaaatagttacttgatagtgcctttcagtgagatttatacatgaaacagagttcaataaaattattgcaagtttgttaaatttcaaatctaattgcctgtaacatattaggcgcttgtcttagtttgtctatggcatcgtagcttggagaagctgacattacagaaaggatattgctacattaataagattaggaacaaatactaatgtgcttgtaaacatttgccttaatattctttagatacatgccactctggctcaattcttttggtacaactgtttatgattccagagactcctttccaccaaattcaagtcacggtgttttcagcttcttatgtttatttttacccagtaatcttcatagttgacattatgatgttggaatcccccaggcaatccctgagccttacagcgaccatcctaccttatccgtcttgtttcacattctctgttgttgagtccctctcaccccatattggagctttaatgaggcctcaatggtttggaggaaacagtggaatggattgccatatatgttgagttgagaacaagggtcctcttgaggataaacactttacatttattattcatagtacaaagcagtatttttaagatgtgaacatgtttcactcaaattaaatatgaatgatttatcagtatgacaatatagtaaaattaactgcatcaagttcaccaaatgtttcgctttggactctccaaacacaaagattcatatgtatgcattggtggatgttagctttttttggtgtaagtttttgtttgttttcatttttaaagatttttgcctactttatagctcatgttaagctacagaaagcttacgaaaagctttattttatcaatttttttaaccaaatgtttaaatattgaaagtgacattttggattactacttttcactgatgtagtttgcatttattagtacatttcagtttttccttatgtggtgtaaggttttaaaaattccttccaggccgggtgcggtggctcacgcctttgatccccgcagtttgggaggcggaggcgggcgggtaaactaaggtcaggagttgaagaccagcctggccaacatggtgaaaccccgtctctattaaaaacataaaaattagcccggcgcggtggcgcgcgtctgtagtcagagctactcgggaggttaagacaggagaaccacttgaacccaggaggtggaagtttcagtgagccgagattgcgccactgcactccagcctagcgacagagcgagactctgtctcaaaaaaaaaaaaaaaaaaaaaagccgggcatgatggtgggtggctgtagtgccagctattcgggaggctgaggcaggagaatcacttgaacccgggaagtggaggttgcaatgagccaagatcgggccactgcactcctgcctggcaacagagcgagattcagtctcaggaaaaaaaaaaaaaaatccttccagttgattgtttaggtaacagcaaaatctgttttcttagacagcagcataagaattattgatatgccacctttagaggtactggaagcaactggataaatgtgctgaaatctgcatttatttataggctcattagaggctaagtcatagcaacatatgttagttccattcaatttttttttgtctaaattttgtcgagccacatccatctgtatatataactctatcttggtaacagcttttttattctaagccagaacttgttttaactggtggcttcattttaaatgtgtcagctgtattataacacattcgaataagtaatagaaattttattcaaaaaatatggatagaaaagtcatacaggcacactgaaaataaattggaatctagcacgtgacactaattaacaggtggagcatattagactagactaaaatccctgtaaacaataccgaaagacagaattttttaattaaaaacatcttcaggcaggcgtggtggctcacgcctgtaatctcagcactttgggaggctgtggcaggtggatcacctgaggtcaggagttcagaccagcctggccaacatggaaaaaccccgtttctactaaaaatacaaaaaaaattagcccggcgtggtggtaggcacctgtaatcccagctacttgggaggctgaggcaggagaatcgcttgaacctgggaggcagagattgcagtgagctaagatcgcaccattgcactccagccggggcaacaagagggaaactccgtctaaaaaaaaaaaaaaaattcaacaatttaataggcctatgagatatttataaaattgatttgtttacccatcatcaatcaatatcaatttaaactagaaaattttaaacacatcatacaaaaaatataattactcaactatcccctgacttaatctgattaaagcaagacttctggatatttcaaaatgctaaattattggtgaaaaatattcatcttgaacagctcttttatatatatattactactaagtaaaacctaatactgataggtatgatttatgaaatgtttgtgaatgtctatcacagtagtcagaaaatcaaaaaattattttaatctgctgtctaaataattttgatttaaatatttggtattttaattgagtggcagcatatatgtgtgtgtatatatatatatacactaatcaccatttctttactattttgccattttataaaataagcctgaatttgtggagacatttttttaaaatcctatcttttattaaaaaaaaaaaaatttaggccaggagcagtggctcatgcctgtaatcccagcactttgggaggctgaggcaggtagatcacctgaggtcaggagtttgagaccagcctgactaacctggtgaaacccagtgtctactaaatacaaaaaattagtgggcatggtggtgcatgcctgtaatcccagctactagggtggctgaggcaggagaatcacttgaacctggggaagcggaggttgcagtgagccaatattgcaccattgcactccagcctaggcaacaagagcgaagctccatctcaagaaaaaaaaaaaaaaaagactcagacatcaaaaagtaaatatactaaagtcataatattacatagtttgctaaacgctacagtaatttgtaaagtttgtttatgcataccaatcttagattatctaaaacataataaagtttcttttttatgttatattaaacatacaaaagtccaaaatatatccagacacacaagagctgtggctggcattttaagaaacaaataatttagcactatacactgttctgtatatatacagatgaaaaacaaaaccttgaagttttcaaatcataaacagaaatattatttgtgagtctgaacctcaaatatataatactaatacatacagtttactctggctctaatacttagaccctttttatctatgggttccaccttcatggaatcagccaaccatgtctggaaaatatttgggaagaaattcccacaaagtacccaaaagcaaaacttaaaacctcaccaagtactatgttgcacttatgctaatgaagtaatgcataggtattatattaggtattataaattaatattaggtattataaataatttagagataatttaaagtatatagtcggatgtacataggttatgtgcaagcactacactattttatatcagaaacttgagactccttggattttggtatccatggaggagagtagggttggtcctgaaaccaatcccccttgaataccaaggggcgactgtacttctagacatccatgtaataatacgtctctgttggcatgatgtaaggatccagtgggatcatttaggttaagtaagcactgggcctggcacatgagaagtcttcactacatgttacctacggcttcatggcttccttctttttttttttttttttttgagacagtgtcttgctctatcgcccagactggagtgcagtggtgtgatctcagcttactgcaacctctgcctcccaggctcaagcaattcttgtgcctcaccctcttgagtagctgggactacaggggtgcatgcctggctaatttttgtatttttagtagagatggtgttttgctatgttggccaggctggttttgaactcctgacctcaagtggctgcttgccttggcctcccaaagtactgggattgcaaaagtgagccattgtgcccggcccagtttactctttttaatttaaaatatactgtacttttgtgttggatcatcatggaggacaggaggcaggactagattgcatctccagacagagcagcttgctgaagcttgcatcgtgaattttagctccatatctactgcaagaacaagccagaaatcccaagaggacccacagaccctctgaagaaaatggactgctcctgcaggatccaggagactctccaaatactgtgagtgtccaaactgtagaagtaggaaagggagattctcctctcctgaacacacacccccactggagaagctaaaggtctgtttataggagaagtttctgaatttacatggaactgagtcaatttagatagccaagcgaaatataggggtagaggaagcagcagaaaggcctgggagctcactgaatcccctagtgggccatttttgtctggcaccaaagggatccatcaggagggtgaccagaggagcaggaggtaaaactccacagggagaaggaaatctctagctgaactttgtgacaatttgaatggggcaagaagcttctctcctgtatccacagctgagaagccctctgtgggtagggcacaaatctggtgtgcagatttcacaggtgggggaagaaccaagcccctttctttcacatttgggaggtggttagctgggggcaagttttcaagcccatcacaccctctgcctggaagaaggctcggggctgttgcagggtacatggtaggagggagaccagctctttggtttgtgtgggagctggctggggcctgtgactgtcagccttccccaacttccctaacaacatacatgactcagcagaggcagccataatcctcctaggtacacaactccagtgacctgggaatctcacccccataccccacagcagccacagcaagacctgcccaagaggagtctgaactcaggcacacctatccccgcccccacctgatggtccttttctatctaccctggtagcaaaagtcaaaggacatataatcttgggagttctagggctccgcctacttccggtccccctctatattactacagctgatgcttttctggaaagcaccacctcctggcaggagacaaaccagcacaaaactagagcattaaaccaccaaaactgaaaaccttcacagagtctattgcaccccgctgccacctgcactagaacaggtgctggtatccacagctgagaagcctatagatggttcacatcacaggactctgtgcagacaactccagtaccagcgcagagtcacatagacttgctgggtggctagacccagaagagagacaaaaatctctgcattttggcacgtagggagtcacatccataggaaaaggggaagagtactacaacacccagtgggacaaaagaactgaaaacagccttcagccctggactttccctctgacagagcctaccaaaatgagaagtcagaaaacaaacccttgtaatatggcaaaacaaggctctttaacaccccccaaaaaatcacactagttcaccagcaatggattcaaaccaagaagaaatccctaatttacctgaagaataactcaggaggttaattattaagctaatcagggagaggtcagagaaaggtgaagcccaatgcaagaaaatccaaaaaaaatcatacaagaagtaaagggaggaatattcaaggaaattgatagctgaaagaaaaaacaataaaaaattcaggaaactttggacacaattttagaaatgtgaaatgctctgaaaagtctccacaatagaattgaacaagtagaagaaaaattcagggctctaagacaaggtctttgaattaactcaatccaacaaagacaaaaataaataaataaataagaataagaaaatatgaacaaagtctccaagaagtctggaattatgttaaatgaccaaacaagaataatcagtgctgctgaagaagaagagaaacctaaaagtttggaaaacatatttaggggaataattgagaaaagctttcctggccttgctagagacctagacatccaaatgcaagaagcacaaagaacacctgggaaattcatctcaaaaagattgttgcttaggcacattttcatcaggttatctaatgttaagatgaaggaaagaatattaagagctgtgagacaaaagcaccaggtaacctataaaacaaaacctatcagattaacagcagatttctcagtagaaactctacaagcgagaagggattgaggatctatcttcagccttctcgaacaaagcaattatcagccaagaattttgtatccagcaaaattaagcttcacatatgaagaaaagataataattttcagacaaacaaatgctgaatttgccattatcaagtcaccactacaaaacagctaaaagagagctaaatcttgaaacaaattctgaaaacatatcaaaacagaacctctttaaagcgtaaatctcacaggacctaaaaaacaaaaatacaatttaaaaaacaaaaacaaacaaagtatacagacaacaaatagcatgatgaatggaatggtgcctcacatctcaatactaacactgaatgtaaatagactaaatgctctacttaaatgacacagaattgcagaatgaataagcattccccaaccaaccatctgctgccttcaagagactcacctaacacataaggactcgcaaaaacttaaggtaaagtggtggaaaaacatttcatgcaaatggacaccaaaagcaagcaggagtagctactcttaaatcagacaaaacaaactttaaggcaacagcagttaaaaaagacaaaggacattatataatgataaaaagccttgtccagcaggaaaatatcacaattctatacatatatgcacctaacagtggagatcccaaattgataaaacaattactaatagacctaagaaatgagatagacagcaacacaataatagtgggagattttaattctccactgacagcactagaaaggtcacctgggtgtggtggctcatgcctgtaatcccagcactttgggaggctaaggcaggcagatcagctgaggtcaggagttcaagaccagcctgatcaagatgatgaaaccctgtctctacaaaagtaaaaaaattagctgggcatgatagcaggtaccggtaatcccagctacttgggaggctgaggtgagagaatcacttgaacttgggaggtggaggttgcagtgagccaagatcatgccattgcactctagcctgggtgagagagcagatttcatctaagaaaaaaaaaagtcatcaagacagtatacaaagaaacaatgtactgaaactatacacgggaacaaatgtatctctctctctctctctctctatatatatatatagatatatagatatagatatagatatatagatatatctacctgtgtcgaggcatagtgttacacactttatttcaattatttaatttgattttaacaatgagatggataatatcctgctcattttacagatgagacaattgagccttaaaggttaaacaaatgatttcctaagctcattcagccaataaacggtaggggactgcttgactccagcccagttgatcctcaaatccatgatttctgccaccatattcacagaaacaagacaagctgaaagtatagcctgactcttgaaacagtcaaagaattgtgtacgtttatgaaagatatagatatatagatatctatatatctatctatatacagatagatatctatatatctatctatatacagatagatatctatatatctatctatatacagatagatatctatatatctatctatatacagatagatatatatatagagagagaacatttcatccaacaaccacagaatatacattctattcaaaagtgcatggaactttcaccaagacagaccatatgacaggccacataatgagcctcgataaatttaagaaaattaaaattctatcaagcactctctcagaccacagcggaataaaactggaaatcaactccaaaaggaacccccaaaatcacgcaaatacatggaaattgaataacctgctcctgaatgattattgggtcaaaaatgaaattaagaggaaaattataaaattcttctaactgaatgaaaaaggggacaaaatctatcaaaacctccaggacacagctaaggtggtgcaaagaggaatgcttatagccctaaatgcctacatcaaagtctgaaagagcacagacaatctaaggtcgcatctcaaggaaataaaggaacaaaaacaaaccaaacccaaacctagcagaagaaaggaaataaccaatatcagagcagaattaaataaagttgaaacaaagaaaacaacacaaaaaataaatttaacaaaaagctggttctttgaaaagataaagaaaactgatagaccattagcaagattaaccaaaaaaataagagagaaaagccaaataagctcaacaaggaatgaaacaagatacaactgacaccccagaaatacaaaagatcattcaaggctactatgaacacttttatgtgcataaactagaaaacctgtaagagatggataaattcctggaaagatacaaccctcctagcttaaatcaggaagaattagatatcctgaacaaaccaataacaagcaacaagattgaaatgataattaaaaaattacaaacaaaaaaaagtccaggaccagacagattcacagcagaattctaccagatatacaaagaagagttggtaccaatcctattgacactatttcacaagatggagagagagaaaacccttccttgggttttccttcattctatgaacccagtatcattttaatgccaaaaccaggaaaggatataaccaaaaacaaacaaacaaaaaactacagaccaatatccctgatgaaaatagatgctaaaatccttaacaaaatactagctaaccgaatctgacaacatatcaacaaagcatgatcaagtgggtttcataccagggatgcagggttggtttaacattgcaagtcaataaatgtgatataccacctaaacagaattaaaaacaaaaaacacatgatcatctcaatagatgcagaaaaaacatttgacaaaatccagcattgctttatgattaaaactctcagcaaaataggcatacaaggaacatacctcaatgtaataaaagccatctatgacaaacccacagccaacataatactgcatgtggaagagttgaaaccattttctctgagaactgtaacaagacaaggatgcccactctcaccactcctcttcaacatagtactggaagtcctagccagagcaatcaaacaagagaaataaagagcatccaaatcagtaaagaggaaggtcaaactgtcactgtttgctgatgatataattgtttacttagaaaaccctaaagactcctccagaaagcttctagaactgataaaagaattcagcaaagtttccagacacaaaattaatgtacacaaattagtagctcttctgtataccaacagtgaccaagctgagaatcagatcaggaactcaaccccttttacgatagctgcaaaaaaaattaaatgcttaggaatatgtctaaccaaggaggtgaaagctttctacaaagaaaactacaaaacactgctgaaagaaatcatagacaacacaaacaaatagaattacctcccatgctcagggatgggtagaatcaatattgtgaaaatgaccatactgtcaaaagcaatctacaaattcaatgcaattcccatccaaataccactatgattcttcagagttagaaaaaacaattctaaacttcatattaaactgaaaaacagctcatatagccaaagcaagactaactaaaaagaacaaatctggaggcatcacattacctgatttcaaactgtactataagacgatagtcaccaaaacagcatggtactggtataaaaataggcacatagaccaatggaacaaaatagagaacccagagataaacccaaatacttacagccaactgatcatcaacaaaacaaacaaaaacattatatggggaaaggatacccttttcaacaaattgtgctgggataattggctagtcacatgtaggaaaataaaactggatcctcacctcgcctctcaccttatacaaaaatcagctcaagatggattaaggacttaaatctaagacttgaaactagaacattgaaaaaaacccttctagacattggcttaggcaggacttcatgaccaagaacccaaaagcaaatgcaataaaacaaagataaattgctgggacttaattaaactaaagagcctttgcatggcaaaagtaaagtcagcagagtaaacagaaaacccacagagtgggaaaaatctttacaatctacacatctgacaaagaactaatatccaaaatctacaaagaactcaaaaaaagcaacaagaataaaaaagaaacaatccttccaaaaagtaggctaaggacatgaatacacaattataaaaagaagacatataaatggctaacaaacatatggaaaaaatgctcaacatcactaatgatcaggaaaatgcaaatcaaaaccacaatgtgataccaacttactcctgcaagaatggccgtaatcaagaaatcaaaaaatagtagatgttggcatggattcaatgaacaaagaacacttctgtactgtgggtgggaatgtaaactagtacaaccactatggaaatcagggtggagattccttaaataactaaaagtagaactaccatttgatccagcaattccataactgggtacccagaaaaaaagaagtcattatgtgaaaaagatacctgcacatgcatgtttatagcagtacaattcacaattgcaaaatcgtgcccaaatgcccatcaattgagtggattaagaaactgtggtatacgtataggatgggaatactatccaagccttaaaaaggaatgaacgaatggcattctcagcgacctggttgagattggagactattattctaagtgaagtaactcaggaatggaaaaccaaacatcatatgttctcactaataagtggaagctgtgttgtaaggatgcaaagacataaaaataatataatggactttggggatacagggagaaagggtagaaagggggtgagggataaaagactacaaatagggtccagtgtatactgctcaggtgatgggtgcaccagactctcacaaatcaccactaaagaacttacttatgtaaccaaacaccacctgttccccaataacctttggaaataaaaacaatttttaaaaaatgtcactctcagcacatgcagtttcagctttgcttcagagacctgaattactttgattcgtggtccagctaaaattaaattaaattaaattttaaaatgtcaacgttttcaaaggaagtacaataagcctgaaaatattttagataaaaatatttttgtaaatttgacaggttaaggccgggcgcggtggctcacgcctgtaatcccagcactttgggaagccgaggcgaacggatcacgaggtcgggagatcgagatcatcctggctaacatggtgaaaccccgtctctactaaaaatacaaaaaaaagaaaaaaaaaaaatagccgggcatggcagtaggcgcctatagtcctagttactcgggaggctgaggcaggagaatggcatgaacctgggaggctgagcttgcagtgagccgagattgcaccactgcactccagcctgggcgacagagcgagactccatctcaaaaataaaaaaataaaaaattacgggttaatgtggtataagactaaactaattagtagagtacatttgaaacacttcagattacaaatatttagtcctttttaggatacagttttaaaaattaatcactatttttatgaataaaagacttttttttgaattgtaaaattttattttccacacgtcaacattcttattaacacagcttgattgaaaaaattctgaccataagcatgttgattatttccctttggaactggtgaaatcagaaaaataaaatatttattttgcatatatagcatcaaaactattcactcaatgtggccttctgtgtgtatattaaaaggctttcttctggccgggcgcggtggctcacgcctgtaatcctagcactttgggaggctgaggcggggggatcacctgaggtcgggagtttgagaccagccttactaacatggagaaatcctgtctctactaaaaatacaaaattagccgggcgtggtggcacatgcctgtaatcccagctactcgaggaggctgaggcaggagaattgcttgaacccgggaggaagacggagtatttattaaaaagagagaaaagggattgattacagatgttagttgcagatataacttattgtgattggaactaaatgttaccaaaaaatttaggttgtatgtgaaattcttcgataaattttatggacttcaataggtcacagaaaatcttactgtgctcttctttcttttacaacacaaagttggccgggcgcggtggttcacgcctgtaatcccagcacttcggaaggctgaggtgggtggatcactgtcattatttctagctgacataaggtaacaatttacaagctgtggctgtagaaactggaaatctcctggttgactctgctttacttcttgccttcctattttagagaaacaaagcaccacaagaaaggccagaaaggacacaccttgattgcaaacacactggcgtctttctagggagaatatatgggtgacaatattaatttgaaatttatggcatcttttgtagaagtacggacatctatatggcaaataataaatacaagtaaaaatttaacactgcgatagaatcaggaaagtttgccaaaaataccttgtgatcaattattcctttattcactagtatggttgtgatggaatggttgcagcagtgtggtcttaaatagccaacactctctttcatcatccttgcgctatggccattttttttttttttttttttttttgagacggagtctcactctgttgcccaggctgaagtgcactggcatgatctcagctcactgcaacttctgcctcctgggttcaagcgattctcctgcctcagcctcctgagtagctgggactacaggtgtgggccaccacgcccagctaacttttatctttttagtagagacagggtttcaccatgttggccaggatggtctccatctcttgacgtcatgatctgcccgcctcggccttccaaagtgctagaattacaggcataagccactgcacccggccgcttttttcttcagaaaaatactttattttcctaattcagaaatttaacgtaattttcagtctcacattttcaaaaatggtttattctaaaagaagtatgattaaacaattcagcatttttttccaaaaaaaaaaagagtaaaaagttaactttatagtctagtgtagttactaagtaaaaaacaaagatgtagagtcatttattttagctgcacacttggaaataaaacacttctttgcctataggctgagagctttcaaagatgctagcttacagaatgtgggaagacctagtattaaaacattcactcctatgctcaaagggaacataattttgtgtcttctttgactcctaattccaactattaacccagatctatagaaatgtaacatttcattatagcacaaaatattttattatttttatttcagattcaagagatataggtgaagatgtgtaacacaggtatactacatgatgttaaggtttgggcacttgataactccattgccccagtagtgtacatcatacttgataggtagtttttcaatgtttctctcctttccttttttatttttagaactctgcgttgattgttttcatctatgtttccatgttaacccaatgtttagcacccactcataagtgagaacatgtggtatataacatacttatacacaatgcaatactatccagccacagaaaaagaaatagtgtttttttgcagcaacatgaatgcatcagaagtaatgttctttgcagcaatatggatgttaattttctcattataagcaaattaaaaaagaaaatgaatctaaaggccgggcgtggtagctcacgcctgtaatcccaacactttgggagaccgaggtgggcggatcacgaggtcaagagatcgagaccatcctggccaacatggtgaaaccccatctctactaaaaatacaaaaattagctgggcgtggtggtgcatgcctgtagtcccagatacttgggaggctgaggaaggagaatcgcttgaacatgggaggtggaggttgcagtgagctgagatcgcgccactgcactccagcctggtgacagagggagactccatctcaaaaaaaaaagaaagaaagaaaagaaaaagaaaagaaaaaggacaccacatattctcactcataggtgggaattgaacaatgagaacacatggacacaggaaggggaacatcacactctggggactgttgtggggtggggggaggggggaggtatagcattgggagatatacctaatgctagatgatgggttagcgggtgcagcacaccagcatggcacatgtatacgtatgtaactaacctgcacattgtgcacatgtaccctaaaacttaaagtataataataataaattaaaaaaaaaagaaaagaaaaaggaaattaatctaaaattcattagtacctggttaaattgtagatctttgctatggtgaatagtgctgcagtaaacatttcagtgcaagtcttttttctaaaattattttcccttttgggtatatactcagtaattgggttgatgggctaaatggcaattctattttaagttctttgaaaaatcttcaaactgtgttccatagaggctgaattaatttgcatttccatcaacagtgtagaaagacgccctttttttccacaacttgaatatttgtcactttttggcttttaataagtcattctaactagcatgagatagtatcacattgttattttgacttacatttctctgatgactagggacgttgagcatttttctttgtatgtttattggcagcttttatgtctttctttgagtaatggcttttcatattatgtgtctttttttataaaatttctgatagattctatatattaatactttgttgtatgtagtttgcaaatattttattttatactacaggttgtctaatttgtcaatagtttcttttgctatgcagctatttagtttaattaggtgcgaatttccaagttttttccattgaatttacttttaaggtgttatgaattatttccagagggcagtgtctagaagagtactttctaattggtcttctagaatttttatatattaaagtctcacagttattaatctatcttgttttatatatgagaggtagggtttcagttttcttcttttgcatatgactaaccagttttcccaatactatttattagataggtagttatttcctttttatttctattaactttgtcaaaaataagttgggggaaggagtggtggctcctgcctgtaatcccagcacttcagggaccaaggtgagcagatcacttgagttcaagtgtttgagaccagcctggccaacatggtgaaaccccacctctactgaaaatacaaaagttggccaggcgtggtggtgcatatctgtaatcacagctactcgggaggctgaggcatgagaattgcttgaactcaggagtcagaggttgcagtgatctgggattgttccacagcactccctcaaaaaaaaaaaaaaaaaggttcgttgtgtacgagtgtagctttatttcagggctctctctctgttccattggtccatatgtatatttttgtaccagaaccatgtcatattggttactgtagcttctggtaaagtttgaagtcaggtaatgtgaggcatccaggtttgttaacgttgccttggctatttaggcttgtttttctacacattttagaagattttttttaattctataaaaatggcattaagggtttgatagaaatagcacttaatttgtaggtggttttaggcagcacaaacatttaaattatattgattcttcaaatccatgagcataaaatgcttttccatttacttgtgttttctgatttctttcagcagtgtattgttgtactccttgtagagagattttacatccttgattcaatgtatatatattttttgtttgtggctatcataaactgtgttcttgattttgttctcagcttgaatgttattagtgtaaaaaatgctactcatttttgtatgttgattttgtatcatgagacattgctgaagtcattttttaggcttacgagtcttttggttaaatatttaaagtttcccaggtagagaattatatcttctgtgaagataatttgacttcctatttttctctttagatgccttttatttatttgtttgattgcactggctaggacttccagaactatgttgaataggagtgtgagtgttgagtgaatattgttatttttatggagaatgcatctagctttcatctgttaagtatgatgttaaatgaagatttgtcatggatgactcattattttgaggtgtttcttcaatgtctagtttgttgagaatatttttatgaatattgaattttcttgaatgctttttctgcatgttttgataattacataatttttgcttttaatcattttacaaggtgaatttcacttattgactgcatatcataaaacattcttgcattcataaagcccgcatgattgtggaaaataactttttgatttgcttgtgaactcagcttgctagtgtttcatggaagatgtttcaatgttcatgaagaatatttgcctatagtttttttgtgtcttcactagattttggtattaggatgatacttgtttcatataatgaattaggaataaattccactttgattttttatatacattcagtagaattagtaccagttcatcctttttttttttttttgacggagtcttgctctgttgcccaggctggagtgtagtggtgcgatctcagctcactgcaacctatccgtaccgggctcaagcaattctcctgtctcagcctcctgggtagctgggactacaggcacccactaccaacacacttgactaatttttgtatttttagtagagacagggtttcaccatattggccagggtggtcttgaactcctgcccttgtgatccgcccacctcagcctcccagagtgttgagattaacaagcgtgagccaccgtgcccggcctagttcatttttttttgtttgtttgaggcagagtctcgctttgtcgcccaggctggagtgcagtggcatgcatgatcttggctcactgcaacctccacctcctgtgttaaagtgattctcctacctcagcctcccgagtagctgggattacaggcacacgccaccatgcccagttaatttttgtatttttgataaagacagggtttcaccatgttgcccaggctggtctcgaactcctgacctcaggtgatccacacccttcggtctcccaaagtgctgggattacaggcatgagccaccatgcccggcccatcttttttatatgtggtaaaatttggctgtgaatttatctgattcagggctatttatgtttttttattactaattcaatttcattatacatttttgctctgttctagatttttgtttcttcatggctcaattttggaagattgtgtgtatccagtttattttctctaaattttttagtttccatgcatagagatgtccatagtagtctctgaggatgttttatatttatgtgggattagctttcacatgtttaacatttaaatacatgcagaataaaagttggacaaaagtcatattccctcatgataaatatgtgaataaattaggtatagggcaaatgcaccttaagccaataaatgccacatataacaaaaattgcacagctaacaacatagtagatggagaaatgttgtgagcttttactctaagagctagaataacacaaggatgcacactttcttcagtcttactaaacagagtactaaatgttcatggcagagaaattagaaaataaaatcaaaggcatccatattggaaaaaaattaaattattgctgcttgcagatgacatcttaagtatagaaaagcctaagactttactgagaaccactagaataaacaaatttattaaactggcagaatataaaatcaacatacaaaattagtagcatttctatacactaatgattaactatctgaaaatgaaattaaaaaccaatcccatctacaataactgtagttactagactttgaattaaatttaactaaaaagttgaaacatgttacattataggataaagaaccttaaagaaattaaataatacacaaatgaaaaaattacacatatttgcaaaaaactatcaaagtaccagtgacacactaaatagaaaattttaaatatatatctaaaattttatatatatatatatctaaaatttatatggtaccacaaaatacctgaatagccaaaacaaccaagaaaaaaaagactgaaattatcacccaaactgacttagaaatatactacaaagctatagtaatcaaaatggtatggtacttgaataaaaataaacacatacacaaatgaagcagaaaagagcagaaacatattcatgtatttatagctaaatgattttagaaataggtgacagtttcttagggaaaggacagtatcttcagtaaatggtgttgagaaaactatatagccacatgaagagcaataaaacaagatctgcatatcacatcatatatataaatcaactcaaaataaattagatacttaactgtaaggttgaaactggaattactacaaaaaaatatagggtgaaagccctataacattgatctggacagtgacttttttgttgtaatctcaaaaccccaggaaaataagggaaaaacagataagtcatattacttcaaattaaaaagttgctgcacacaattctcatacaattaacaggattagacaactgaagaatcagagaaaatataggcaaatcatacatgagacaagcgttttgttgtatactaaaattactacaccaaaaaaaaacttaaaaatgagcaaaaggtttgaatatttttcaagacatacatattgccaagctataaataaaaaatgctcaatatcaattatcagaaaaggaaagcaaaaaaaattactatgagatatcaactcactcctgttagtatgactcttattaaaaagtgttagtaaagctgtgcagaaaagggaatgcttgcacactgttgggtgaatataaatgggacagccattatgaaaaacaaaatagagatatctcaaaaaatttaaaatcaaactatcaaatgcagaaagtgcaatattggatacatatccaaaacaaaatcggaatgaagaaacatttgcaactctatgttgttcgcaacactcttcacaatggccaaaacataaaatcagtggttcaacatctaattagcatataaagacaatgtggtgtatatacacaacaaaatactattcatctttaaaaaagaaaatgtagttttcaattacatgattaatctggaggacattagttgaagtaaggcatagatattattactttataatttcacttaaagatggattctaaaaaacttaatctcattgaagtagagagtaacatagtgaccaccagatgccaaggtattcagaaagtgaagcttgaaaataaatctgtcaaacaatacataattatagttgggcaggagaaataagttcaaacaatatgttctacagcatagtgactatagttcataataatgtatttgcatttttttaaaaaattaagacaatatcatgtgctctcaccacaaagagttaactatgtgaagcattacctaaaattgagcatttgacaatgtacatagacttcaaaatgtaatgttttacaaaataaatacacatttatttattacagatgataatggtatgaaagacactaaaagggcaggtgttcgggctgggcacagtggctcacgcctgtaatcccagcactttgggaggctgacgtgggcaaatcatgaggtcaagagattgagaccatcctggccaacatggtgaaatcccgcctctactaaaaagacaaaaaacttagctgggtgtggtggtacatgcctatagtcccagccacttgggaggctgaggcaggagaattacttgaactagggaggtggaggttgcagcgagccgagatcgtgccactgcactccagcctggtgatagagcaagactccgtctcaaaaaaaaacaaaacaaaaaaacttacattgataagcaaactctccagttaaaatcaatttttctttctttttttgagacagtctcgccttgtcacctaggctggagtgcaatggtgcaatctcggctcactgctacctctgcctcctgggttcaagcaattcttctgcctcagcctccggagtagctgggattacaggtgcatgccaccccacctggctattttgtatctttagtagagacagggtttcaccatattggctaggctggtctcaaactcctgacctcatgatctgcccgcctcggcctcccaacgtgctgggattacaggtgtgagccatcgcacttgaccaaaaaacaatttttcaagtgcattaaaaataccaactttctcatcaaaacctacaaagtagcatgtgaaatgacatggcattacaaaagtgagaaaattgtagctataaaacagaaaaaaagaagtgctgtgatgtcatgcaaagttggaaaacacgtaagacaaacctgaagataaatggaaaataaaacaagcagaattttgctttatattcagcaagattcaggtttgctgcctaaaaaaagatcctatccacataaagaatcaatgttttttctttgtcatttatattttacatctctgacttaaagttacaaaataactctagcaggaatatttacagattataaaacatctgttactcggcaagcactgtcacgtttttttgctacatttatatattaaaacatcctcatgacttatgaagcctccttagtacttacctgaatgttatgggaagtcagggaccctgaacagagggaccggctggagccgtgggagaggaacataaattgttaagatttcatcttaatatggacatttatcagttctcaaataatacttttgtaatttcttatgccggtctttaatctcttaatcctgttatcttcataaactgaggatgtacatcacctcaggaccactgtgataattaactgtacagattgattgtaaaacgtgtgcttgaaaaatatgaaatcagtgcaccttgaaaaagaacagaatagcgacttttatggaacaagggaagacaaccataaggtctgactgcctgcggggtcgggcaaagagccatatttttctttttgcagagggcctataaatggacgtgcaagtaggaaatatatcaccaaattcttttcctagcaagtaatattaatactctgggaaaagaatgcattcctgggggaggtctataaatggctgctctgggaatgtctgtcttgtacagttcagataaggactgagataagccatggtctcctgcagaaccctcaggcttactagggttgggaaaactcaaccctggtaaatttgtggtcagactggttctctgctctccaaccgttttcagttgtttatcaagacaatacatgtactactgaacatacacccttatcagtggttctgcttttgccctttgccctgtgatctttgttggacccttatcagaggttctgcttttgccctttgatctttgttggagccttattagtggttctgcgtttgccctttgccctgttccctcagaaacgtgatctttgttagacccttatcagtggttctgctttttgctctttgaagcatgtgatctttgtacctactctctgttcttacaccccctccccttttgaaacccttaataaaaacttgctggtctgagactcaggcgggcatcatggtcctactgataggtgatgtcacccctggcagcccagctgtaaaattcctttctctgtgttatctctatttctcagccggctgacacttatggaaaatagaaagaacctacattgaaatattgggggcgggttcccccaatacctgaactggctcaatcaacaaataaatttacttctgtcaattataaaaagtgaaaggaataataacttaaataggcttatataaggttcttcaattagaagaacaaaatagaatgttttaattcaataaaacaatacactaattgtggaactacatctaaaaattattttgtgtgccctactaaattttataaaaatagtttatatctttgaccacttcacataatgaaaacctcataaactataaaagaaaaaaaattgtaagaaacaacaaaaaaatgtgggctaggcatgagtaccaatcaagtaaaaacaaaatttgcataagattttgaacccataagccatactattttacagtaattcagtagaaagagtatagatttgctttccgcatttttgaggtttatagttttctagtaaattagttaccttactaaaatgttttgttccaatattgctcttttcttctgaaaataggaacaaatttatactcacacaaacatgcttacttactccataattttcttacacctagggtttaacttaagagtaatgtatgtatatatttaactttactaagtcaaaactaacaagtctgtatgtgtttgcaggcagagaaacaacatgttcaaaaatacatataacaatttttttaatgcttatttaggactcagaatgtgtggactttatttatacttctatataatttttagcataaccataaaaatagccctgtagtcaataacaattgtacattaaaaaaaactaaaactgtagaattggtttataatacaaaggataaatgctggagatgatggatacttaatttttcctgatgtaattattacatattatatgtctgtatcaaaatgtgctatatatggcataaatatacacatacaatgtatccacaaaaattaaaaagtataaacttagatgagaaataaatatttaacctatgagaacattctttaacctccttgcagtttaaagtcactggcaaaagggattactagaaatgtttgtccattatgttaccaaatagtatgttaccatcttttgcctacaccagtgagtaaagtgaaataggttaaagttaatggcatactaactttattaaatgttttataaatgttaaataaaattttaataaaatattaagttcacacataacttaaaattttaagaacgtacattttattacataaaagtacaattagtaaaataatttactaattttaactaaaatttaaaatgcttttttctcactataatgcagaatattaccctgaacacccacctcatgtgtcacttatattaacaaaaagagcctctccacttagatttttatgtgtcttacattttaatgtccttacccttccataaaaaagatcataatgcccaactaataaaaaaaaattctcctatctctgatgcaacaattagtcacaagttgaatacaatagaaatgaagaaaacaagaagagttttgaattttgagagttgaattacattattcatgttgcaaataatctgtattttttaaggaaaaaagtatactttcaatgtaattataacttttcaaaaaattttctacaccttttaaagttatacacaatttatctaacaactttagttctggattattttttatactcagcattctgatttactgtaatgtctgaagtgtcagtgccttagatatttctgagctatctgatatttacatagacttaattttagaataaatattgttttatatttactgcatctacaaaaaaaaaaaaaaaaatatatatatatatatatatatatatatatatatagagagagagagagagagagagagagagagagagagagagagagagagagagagagagatggagtttcacacttgttgcccaggctagagtgcaatggcacgatcttgactcactgcaacctctgcccctccagttcaagcgattctcctgcctcagcctcctgagtagctggaattaaaggcactcaccaccatgccttgctaatttttgtatttttagtagagacagggtttcgctatgttgaccaggctggtctcgaacacctgacctcaggtgatccatccacctcggcctcccaatatgctgggattacaggtgtgagccactgcgcccagcctgcagaaatatattttagtactaactctctggtgttttctaaagctatagattttgaaaaaatgtgtttttctaaatgtattacatttgcagagtttttctcccatacagattcactgatgttgaaaaaactttgagcaactgcttcagggtttttctctagtacaaaatgtacatgataagctttatgataccagtaaatgtactacaaccctctttatgtttgtaatctttgtcttcaaaacgaatactcttcttcactttaaaggcttatattttcttaaagtctttagacagtaattgcatttataatgcttttattaagtaccaacattctgatattaagatgtcaacagatattaatggctattttacactctttatatttgtacaatttttcttaagtataaacgctttcctgtgcaataaggtttgagccttaattaacagtattgccaaattcttcacacttgtagttttctccagtatgaattatcttacatacaatgaagtgtgaaaaccatttaaagtctttgacacattctttacatttctagaatttttcaccagtatgatttcctttatatttagaaaaatttgaggtgttgtcaaaatcattatcacacattccagttctgtagtttctctccagtatgtatttttttatgtttagtaaggtttgcagattggttaaaagctttgtcacatctctcacatttatagggtttctctccagtatgaattatcttatgttcagtaagttttgaggatcggctaaaagctttgccacattcttcacatttgtagggtttctccccagtatgaattcttttatgtgtagtaagggatgaggagtgtttaaaagctttgccacattcttcacacttgtagggtatctctccagaatgaattttcttatgttcagtaagttttgaggattggataaaagctttgccacattcttcacatttgtagggtttctttccagtatgaagtttcttatgttcagtaagttttgaggatcggttaaaagctttgccacattcttcacatttgtagggtttctctccagtgtgaattctcttatgtgtagtaagggctgaggagtgtttaaaagctttgccacattctttacatttgtagggtttctcttcggtatgaattttcctatgttccgtaagatttgaggatcggttaaaagctttgccgcattcctcacatttgtagggttgctctccagtatgaatgtttttatgttcagtaagttttgaggatcggttaaaagcttttccacattcttcacatttgtagggtttttctccagtatgaattctcttatgtgtagtaagggttgaggattgggtaaaagccttgccacattcttcacatatgtagggttgctctccagtatgaatttttttatgtgtagtaagatttgagaactggttaaaggctttgccacattcttcacatttgtagggtttctctcctgtatgaattatcttatgtgtagtaaggtgtgaggactggttaaaggctttgccacattcttcacatttgtatggtttctctcgagcataatcttttttatattcagtaaggtttgagaattggttaaaagttctgtcacattcttgacatttgtagagtttctcacaagtataaattcttttatgtttagtaagctttgaagattggttaacagctttttcacattcttcacatttgcagaaattcaccttggtataatttctttcatgtcgagttaggtgtgaaagcatgcaaaatgatctgccacattctttacatttgaaaggtttattttccatatgttttatcttatgtctatctgaatgtgaaaatttattaaagactttcacatatttatcacattgaaacattttgctctgcatagttggtaaacattggttaagtccattataacctcccttgtgcaacttacattcatccacacttttacagccttttaactgaaaattatcatttccacatttttcatatcttctcagtgtcactttttcaaaagaatcttttatgttctgctctggccaaaactcttgggcaaaatgagaacacattactgaaagaaataaaaataacacattactttacagactcagataaatatactttccaaacctaacttataaaattacacaaactacataagcaagatggcaccacaggccataattaagtgtatgtgttgccccaggtgagcacaatgcaaagagccacatagaaaaaaaaaaaaaattctgtcacatttacccaacacagctttttctactccccaatataacataatgttttcagaagtaaattacagccaggtgcagtgactcacacctgtactcccagcactttaggaggctgaagcgggcggatcacgaggtcaggagttcaagaccagcctggccaacatagtgaacccgcatctctaataaaaatagaaaaaaaattagccaggcatggtggcgggagcctgtagtcccagctaattgggagactaaggcaggagaactgcttgaacctgggaggataaggttgcagtgggccaagatcgcaccattacactccagcctgggtgacaaagcaagactctgtctcaaaaaaaaaaaaaaagtaaattgcaaacttcaattatttacatatagaggaatacctgagagtagataatttataaagaaaaaaggtttatttggctcacagttcggcagactgtacaaaaagcatgtgccagcatctgcttctggtgagggtctcaggaagcttacaatcacagtgcaatgcacagattaactggacacatcacatggtaagatacaaagcaagtgtcaggtaaagaagccaggttttctttttttttaaatgaactagctcttacttgaattaacagagtgtaaacttactgattaacaagaagatagtgccaagccattcatgaggaactttccctcatgacctaagcacctcccactaggtcccatattcaccttctatcaggacccaaatcaacaatgatgattacattgcaatatgaggtttggagaacatagacatccaagccatatcacagaccaaataggcttaacagacctgtacaaaccttttcaatcaaaagcaagagaatacacaatatttttctttgcacctggtgtattctgttaggacacaaatcaagtcttattaaatttaagaatgctggctgggtgcatgcctataatctcaacactttggaagacccagctgggccagaaatttgacaccagcctgggcaacatagcgagaccctgttcctacaaataatcaaaaaaatagccaggcatggtagcagccatggcacgtctgtagtgccagctacttgggagactgaggtaaaaggatcacttgagcctgggaggttatggctgcagtggagccactgcactccagcctgagtgacacagtaaaatcttctaacagcaacaacaaataaatttaggaaaaccaaaattataaacattttctgaccaaaagtgaataaaacaaaaaattaaaaggaaaagtaaaattggcaaattgaaaaatatatgaaaataaaacagtgttcaacatattcttggctcaagggccaaaacacttaatttttcaaaaatgtcaatgcaaccaaaagtggtgaacaaattcaacataatctctataaaaaatgcattagcagtggctcatgcctataatcctagcactttgggaggctgaggtgggcagattacctgaggtcaggagtttgggaccagcctggccaacatggtgaaaccccttctctactaaaaacacaaaaattagctgggtgtggtggcatgtgcctgtagtcccagctacacaggaggctgaggcaggagaataacttgaacccaggatgcagaggttgcagtgagctgagatagtgccactgcactccagcctgggtgacaaaatgggactccatctcaaaaaaacaaaaaaggtatacacacacacacacacacacacacacacacacacacacaatggattattcagccttaaataaatctagtcaacattttaagataaactttgagaatattatatcacctgaagtaagccagtaacaaaatggatactatatgattccacttatgtgagatatcttaattagtcacactcatagaaagtgcaagggtgtttgtcaacggctggagagaggataaaatgggcagttgttaatgggtattgagttttagtttcacaagatgaaaaatttatagaagtcttttgcataacaatacaaatatactaaacatggctgaaatgtacagtttttttgagacaggttctcactctgtcattcaagtttgagtaaagtggcacaattatggctcactgtagcctcaaactgccaggctaaagtaatcctgcaccatcaatctcccaaaaagctgggaccacaggtgcacaccaccatgcctggctatttttaaaaattttttgtagacagagaatctccatacgtttcccaggctagtctcatacttttgggctcaagcaattctcctgccttggcctcccaaaatcctgggatcaaagatgtgagccactaccatgcctggccctgaaatacacacttcaatagattttagatggtaaaatttatgtggttttacaattaaattttttaaaagaaaaaatggaaaaaatacagaattataaatctttacatgaattaccttcaaatcacaaaagtgtttctctcacacaaaagaaatatatatttattattaaacacatggtgaaaataagactatctcaccgggtgtggtggctcaccccttgtaatcccagtactttgggaggccaaggcaggtggatcacctgaggtcgggagttggagaccagcctgaccacatggagaaacctcgtctctactaaaaatacaaaaaattagctgggcgtggtggcgcatgcctgtaatcccagctgcttgggaggctgaagcaggagaatcacttcaacctgggaggcagaggttgcagtgggcggagatcacaccactgcactccagcctgggcaacaagagtaaaactccatctcaaaagaacaaaaaagactatctccatgactaatcacttagacaagataaaacaatcattgaaaatcagctaagaaagaatacatacaagataagccataaccaaaattggggtcatattcatagataaacacacatatgtaatctgattgggatagatatgtggctgatttatttcttaattaaatcccacaaagtgtacaaacaattgcaaattgtctaaaatggtaaaacaaaaaaacaataaacagatgtcaaactgaaaaaacacattaatatggaatggcaaaaccatagtaagagaaacgtttactcataaaatcttgcaggcaacactgatgtaccattaaaaatgatgtgtctaggccagatgcagtggctcacgtctgtaatcccagcacattaggaggtgaggctggcagatcacaagttcaggggtttgagaccagactcggcaacacggtgaaaccctgtctctactaaaaatgcaaaaaaattagccaggtgtggtggcgcacacctgtaatcctagatactcaggaggtggagacaggagaattgctttaacccagtaggcagaggttggagtgagtcaagattgcaccattgcactccagcctgggaaacaggagcaaaactccatctcaaaattaaaaaaaaaaaaaacaaaaaacaaagacaattttgggccaggctctgtggctcacacctgtaccagaactttgggaggccaaggaagatggatcacgaggtcaggagttcaagaccagcttggccaacatggtgaaaccccatctctactaaaagtacaaaaattagtcaggcatggtggcatgtgcctatagtcccagctactcaggaggctgagacaggagaatcacttgaacctgggaggtggaggttgcagtaagcagagattgtaccactgaacttcaggctggacgacagggcgagactctgtctcaaaaaaaagacagaaattttacgtcttaaatatatgctattgttacacaaaacaaaactgctgtaatccaactttagaagcaaaaaaatagccttacattgctatatatatatctatagatatctatagagatatagatctatatctctatagatatatagatatatctatatagatatagaaatagatctatagatatctatagatatagatctatagatatctatagatagatatagatctatagataccgatctatagatatagatctctagagatctatagatagatatagatctagagatagagatcgagatctatatatataaaatgttaaatatataaaaatatatatattgcagaatatggttagagcgcctgatatataaaacaaatatctgcgaataaattatattatttagatacaggctggacaaaatgggtgcaaatcatagaattattttttcctacatcaagcctaaatttataagtaacagttttagtaaatatggagtgcctacaaattatctaatttactttagacattacatgtaaattctagcatattgttctaaatttctaaatctaaaattacagacaaaattgaaacagaaaatggagaataaaaatgtatagcaggagtgaaattggtaagatgggagaataaaaggtgccctattttgttatctcctgcacagcaagacaatttgtcagccatccctgacaaaaatgcctttatgagattgccaggcatcatggctcacacctgtaatgaaagatacatgatatattaagtttagagaattgcttcaggttaggatttcaaaatcagcctgaattatgtatgtagcaagactccatctcaaaataagtgcctttgagagctttgagatccagagagagagggagttgtggaactctgataaagcccaagatttaaaagtcttcttttcagaaggcaggccctcattcaggtgcaaactacaggatccctgttcttaactacagactaggaaatggcccacccaacttggtcccactaagaattctgaacttactatgtaaccatcccaaactcctcacagccaaagtctgggagagattctgcttttccagaggcccagaggaaggtacccatttacagccatgtggactggcctaaggtaaaggaccttagtctttactgtggtccttgaagcagttcaatgactcagttccagctcgctgagccacagtttatggtcagttctgcctatacagaaacccacacagtgacctggaaagatcctttctggtactcgctgaaagccatagtcattcatattttgatataaggcccaccatatgcagaccctactgcaaaaacctgccctagtgtctgccctacagagcaaaatcctctgccaaaattcagtctgtccaaaatgggaatttaaactacccaagttttttaggacaagccaactaaaggcagaccctagtgcagacccagcagccttgtgacaaagctacaaccccctctccactacaaacccagagggcatcccatcaccctgagcgtccaacaaaagatctttaccttctgaaaccagtttataaaaacttgaggtgttttctccttctgtacacagatgccaatgcaaaactatattgtgcccattgtcaatgctgctagtttaacataacactgaaagtattggcagaagaattagtcgaaaaatgaaaaagagcaattgaaattgaagacacataagtaaaaagttgctggctgtagctcatatgatcatatatataaacataaacagtacattaaaacttgtaaatacactcagtaaatcagaaaaatataaaactaacatacaagttagggttccataaacttaaactctctgataaaatagagaaaaaaacttatttacaatagcattaaaataataaatttctgagaacaaatttaaccaaggaggtacaaaatctttacagtgagagatatcagtgaaagatattagaaaagacataaataaacttgaaaatattttatgtctatgaactgaaagaataaatactgtgccatgttatccaaaatgatctatagattcaagactccctatcaaaattccagtggcatttgtttttcacagtaataaaaaatataattctaaaatttaaatgaaactatgatacactttaaatagccgaagcaagcttgagaaaaaagaacaaagtagaagaatatcatactttgtaattttcttttttttttttttttgagacggagtcccactctatagccaggctggagtgcagtggcacaaacttggctcactgtaacctccacctcccgggttcaagcgattctcctgcctcagcctcctgagtagctgggattacagatgtgtgccaccacacctggctaattttttgtatttttagtagacaccgggtttcaccatgttagccaggtttccaaactgctgaatcaaaagaaagatttatctctgtgagatgaatgcacacatcacaaagcagtttctcagaaagcttctttctagtttttatctgacctcctgatccgcccacctcagcctcccaaagtgctgggattacaggcgtgagccaccgtgcctggcccttgagccgatgcccagccctttataatttcaagactacattagaagactatagaaatacaaacaagtaaaatgtgtagaaaaatgaaaaaaaaaaagggcggggaatagtggctcacacctgtaatcccagcactttgagaagccaaggtaagcaaatgacctgagggcaggagtttgagaccagcctggccaacatggtgaaaccccatctctactaaaaacacaaaattagccgggtgtggtggcacgtgcttgtaatcccagctatttgggaggctgagacaggagaactacttaaacccaagaggcaaaagttacagtgagtccagactgtagcactgcaccccagcctgggctacagagcaagactctgtctcaaaaaaaaagaaggaaagaaaacaatagaaaagaaaccacttctcatacgtttcagacaagatggaaaaaaagaacttaaaaaatcatttaacagtttctcaaaattatgtaggtatttctgtgcctccaaaaaaaatgagtaaggattcagattgcacagtctcttgtatgccatgaagcggacactggttctcaccgaaaacttaaaggaaaattaccaaaaatgtaaacagaaaccttagagaatttaaaagcataagacagaaaatgctcaaatgtgagagcataaaatactcaggctttccagaaattatttcctttaaaacacggcttcccaaatcacattttaaggactggctttctctttgacctttggacctctcatcagtgtcacctgttgtattcactttcattctcacttacctgggggttcattcaccatctcatgtctcttcacagtcaaaggctctttttcttgctccagacaggtgatcaggtcttgcttagagacagcaatacctgttttattaaaaaataaataacattaattttgctcatattctccaattaccaacctagtaatgtgctcagtaaagagaatgtaatggaatagtctagtaaattaatcccaaaatactgacttataacagaaatttttaaatacttagaaaatattctaaatttgtaggttcttaatttcactacccagtactactgaatcaaaacttggtgttggcaattagattttaaggtgtgggcaacaatattttatgccactaaacttctgaaattaccactagagtgaaggacacagatcagctcaggaatgtgttaagttcagatcaagatgaaacatactaaagaaattcttctctatacagacaaatccttaagattttctcaaaaacagggatctgaaactcatttatgcaaagcatacattaccaaaatatattctacaaagaagagaaatgaaacctttacggtatattagaaactgtctgttgggacaggcatggtggctcacaccagtaatcccagcactttgggaggccgaggcgaatggctcatctgaggtcacgagttcgagaccagcctggacaacatggtgaaaccctgtctctaccaaaaatacaaaaaaaaattagctaggcatggtggctcacgcctgtagtcccagctacttggaaggctgaggcacgagaattgcttgaacccaggaggcggaggttgcagtgagccaagatcgcaccactgcactctagcctggtgacagagccagactccgtctcaaaagaaaaacaaaaaaaaaaagaaactgtgtgtttaagttatccttacccaggaagaccaggtttctgtagttctctaaaatcacatttttatataaattccgctgtgcagtgtccaggcattgccattcttccagagagaattctatggccacatccctaaatgtcaacagtccctgaaaaacacatacacacaaacatattcaccaggtagccaacagagattataatttgactcaaggtaaaatgagagactaaagagaacaggttctgatttataggagtgactgaaattatccaataaaatcatattttttacacagaaatatttcctaatgtgttctctaaccctgagaaaacagagtggcacaagagccacaacaccagtgtatatataataattttctaaataataacatatataataggtcaggcacagtggctcatgcctttaatcccagcactttgggaggccgaggcgggcagattacctgaggtcgggagttccaagacccacctgaccaacatggagaaacccaatctctactaaaaatacaaaattagccaggcgtggtggcgcatgcatgtaatcccagctactcaggaggctgaggcaggagaatcacgagaatggcttgaacctgggaggtggaggctgtggtgagtggagattgcagtgagctgagatcgtaccattgcactccagcgtgggcaacaagagtgagactccatctcaaaaaaatacataattaagggcataaacacaaacacgtagctttttgagtgcttcacaagcttctgtgtaataaatgctatcttgtttaaataatagctaattgagaacacagatggagcctcaacattagatgttctccatttttactaaggaccgcaggttttcccaatagaaatgttgagttatctacacctttgcatgttcaatagccacaggtaacatttttaatattgcagattataaaataatcgtgagaattctgcatggcatataagaagtcatgatgtagagaagcctctggtatatggaaaagaagtatttttcagagactcttgactatcataagagtttttataagtagttaaaacaaattcattagggagaaaaaacccaagtagagaagtcaaagtttgcaagtactaaacgcatggcattccaggaggcagagcggacacagctcttgatctgagacatgtttaactgaaaaaaagccattttttcctttctctgaaaattcttttcacatgcgattctctggacaaattacacctgcatctggagaatatgcctttaaaggtatcagcaccacatgtttacctggtaccaccacactcacaggcagaaggaccaagactcacagaaaaagtccacccatttctgtccttcataccagaagcgattcaggaaccatgagctgctccacggagataaaagtaaaagttccttttcttctgtcctcaggtgtcctcccctgccatggacatcagcaatttctgctacagcaatgaaaatacggaccacactttcctgtcactaccaaaccaaacagaaccagccctttgaccattctttagagcaaaggtagaactctcatgaatatatcttgaacccctcatacttgattttggcctcatgttagagtcacaagaggcacttaattaaaacaacatgggcgggaacagtggctcacacctgtaatcgcagcactttgggaggccaaagtgggcagatcactcgaggccaggaatttgagaacaacctggccaacatggcaaaaccccatctctactaaaaatacacaaattagccaggcataatggtacgtgcctgtaatctcagctacttggaaggcagaggcaggagaatcgtttaaacctggcaggcgaatgttgcagtaacctcaggtcgcaccactgtactccagcctgagcaacggagtgagactccgtctcaaaaacaaaaaacaaaacatgatacctccgcccagaagaataaacagacctgtggatagggcacaagtagatatttctgcaaactggccatgtaatcttaattagaaacctgggctgggcatggtggctcacacctgttatctcagcactttgggaggccaagacggggggatcacttgaggtcaggagttcctgaccagcctggccaacatggtgaaaccccatctctactaaaaatacaaaaattagccagccgaggtggcacttgcttataatcccagctactcaggaggctgaggcaggagaatcgcttaaacccaggaggtggaggttgcagtgagctgaaatcgcaccactgcactccagcctgggcacagagcaagaccccacctcaaaaaaaaaaatcaaacctgggctgaaaaccacttagctgggcattgcctttaaagctttaatgggcttaaaaaatacttggaaactgtggctccactctctgtgatgtaattctgcagacttagggttcatgagtggtttttttgttctttgggtttttgtgtgtgtgtgtgatggagtgtcgctctgtagcgcaggctggagtgcagtggcgtgatctcgactcactgcaacctccgccccctgggttcaagcgattctcctgcctcagccttgagtagctgggataacacaggcgcctgccaccacaagcagctaattttttgtgtattttaagtagaggcagggtttcaccatgtcggtcaggctggtctcaaactccagacctctagtgattcgcccaacttggcctcccaaagtgctgggattaaaggcatgagccatggcagccagccattaatgggtattttaaacccattaatgttccctatcaattgcttttctggggctcatgattagcattagagaaagcaggcacagcatggagtcccttacactcagcactcttgttacaacacaaatacttctcaaatgaagactaccaattttcatattctttgctggctctttaaagtttacagaataaacagaaggcagcaacatctaaataagtctgcatgtggaaaccatgaggtacacatgtactaatgaggcaagagaatagggtctggaggcagggaacctaagaccatttcacaccgaattcctagacctaaatggaaaggaaaactaactttccatgcctaagtaacaaaaagaccagaggctactgcctttgcaaatccccaccttttctgtgaggcagataggaaattggctgtccacaaccattcagactgattgtgggctgagtctctatttgaataaaagtgacactttgtaacttcaccttagcctctaattggttgcttttgcaatcaattggatatttgcagaggattgtgacctttttaactttgcttcagcatctgattggtttcttcctgcaactaatcagagcaattgtgggccaccacttcatttacatgaggtgagcaccaagtggccaatgggaaacctctaggggatatctgaacccaagaaaattctgttgtctgggaccttaagccattgttcgggcccactttcacactgcagagtgtaatttcattttcaataaacccgttttgttcctttgttgcttcattcttttcttgctttgctgtttcatccaattctttgttcaaaaggccaagaatctggacaacttgcagtcaagaccctctactggtaacttattttggtgagccaggcaggagaggaggtaggcccaaagtattggatttaattttttcctttctccttttacatacagggaagtctttctctctttttctctttctctctctttctctctctctcctcccctccccccaacccagggccactttttgatgaaactgaaaggtttccacgtgcaagtgcctgactaccacctcacagtttgggtgagggacctgagacctttcgtctgtttgtttttctgagtcctattgtttttgtcctttttctgagactgtgtccggaattggtgggttcttggtctcactgacttcaacaatgaagccgcggaccctcgtggtgagtgttacagctcttaaggtggcgcgtctggagtttgttccttctgatgttcagatgtgttcggagtttcttccttctggtgggttcgtggtctcgctggctcaggagtgaagctgcagaccttcgcggtgagtgttacagctcttaaggcagtgcatctggagttgtttgttcctcccggtgggctcgtggtgtcactggcttcaggagtgaagctgcagatcttcatggtgagtgttacagctcataaaagcagtgtggacccaaagagtgagcagtagcaagatttattgcaaagagctaaagaacaaagcttccacactgtggaaggggaccccagcgggttgccactgctggctccggcagcctgcttttattgtcttacctggccccacccacatcctgctgattggtagagccgagtggtctgctttgacagggcgctgattggtgcctttacaatccctgagctagacacaaaggttctccacgtccccagcagattagttacatacagagtatcgacacaaaggttctccaaggccccaccagagtagctagatagagtgtcgattggtgcactcacaaaccctgagctagacataaatgttctccaaggccccaccagagcagctagatacagagtgtcaattggtgcactcacaaaccttgagctaaacacacggtgctgattggagtgtttacaaaccttgagctagatacagagtgccgactggtgtgtttacaatccctgagctagacataaaggttctccaaggccccaccagagcagctagatacagtgtcaactggtgcactcacaaaccctgagctagacacagggtgctgattggtgtgtttacaaaccttgagctagatacagagtgccgactggtgtatttacaatccctgagctagacataaaggttctccaaggccccaccagagcagctagacacagagtgtcgactggtgcactcataaaccctgagctagacacagggtgctgattggtgtgtttacaatccctgagctagacataaaggttctccaaggccccaccagagcagctagatacagtgtcaactggtgcactcacaaaccctgaggagctagacacagggtgctgattggtgtttacaaaccttgagctagatacagagtgccgattggtgtatttacaatccctgagatagacacagggtgctccaaggccccaccaaagcagctagatacagagtgtcgattggtgcactcacaaaccctgagctagacacagggtgctccaaggccccaccaaagcagctagatacagagtgtcgattggtgcactcacaaaccctgagctagacacagggtgctgattggtgtgtttacaatccctgagctagacatactctccacgtacccaccagactcaggagcccagctggcttcacccagtggatcccgcaccggggctgcaggtggagctgcctgccagtcctgcgccatgcgctcacactcctcagcccttgggcggtcgatgggactgggcgccgtggagcagggagcggcatccgtcagggaggatagggctgcacaggaacccacggaggcgagggaagactcaggcatggcagactgcagtcccgaggcctgccccgcgggaaggcagctaaggcccggcgagaaatcgagcgcagcgccagtgggctggcactgctgggggacccagtacaccctccgcagccgctggcccgggtgctaagtccctcattgcccggggcgggcagggccggccgggggctccgagtgcgaggcccgccaagcccacgcccacccggaactccagctggcccgcaagcaccgcacgcagccccggttcccgctcgcgcctctccctccacaactccctacaagctgagggagtcggctccggccttggccagcccagaaaggggctcccacagtgcagcggtgggctgaagggctcctcaagtgccgccaaagtaggagcccaggcagaggaggcgccgagagcaagcgagagctgtgaggactgccagcacgctgtcacctctcaagaccttttccttttctcctttttcagtctttcagcagccattttctagtagatgttggtaattgagtggaactagccagagccactctgatgttctctgaaggccaatgagcaaacagggctgcctgtcctgcccagaagggggaaagattttctatcctttctggttatagtcccttatccctacatatgacaccgttggcagcgggcagttcgcccagggtgaatcacatgtttcaggtgacttaaaccttcttttcttttcttatgctaaattcttcccttcccccactcaactagctatgaacagaaaacccacctagctatgcaaaaaggttatataagtcagagggtccaagcatgttgcaggtggtctctgaggtgcacggtggtgggggggtggggggagcttatgaaaggaaatgtattattgctgaagttgagagagttaaagggttgctttaaatgggatagataaacctttaaaaaagctcatagtagtccgggcgtggtggctcatgcctgtaatcccagcactttgagatgctgaggcggacagatcataaggtcaggagttcgagacctgcctgaccaactaaaactacagaaaaattagtcttgcattgtggcacgcacctgtaatgccagctactcaggaggctgaggcaggagaatcgcttgaatccaggaggcagaggttgcagtgagccaagatcatgccactgcactccagcctggacaacagagcaagactctgtctcaaaaaaaaattaaaaaaaaaaaacaacacctcatagtaggtcatcagtggtggagggaaccattctaaagttgtgctggcacctatctaaggtcagagccatctgacagactaagtctggggcctaaagaggggatgttcccagagaccccagtctgggccaagaagttttccagggagatgccccaggaaaaatttgggtcacctaatgagccctctactttgcaaagtcctcttcttttttctagaccactatgagcaactcttaatctatttcacctgattccactgtggggaactctatttccaattctgattccctgcttggctatatcttccaccattagaatcaatttgaccctgacaatctaacaagaaaatgtataatatttttctgcaatactgtctggccctattatgagctgctcagttcagaacactgggcagtcaatggtagcattaattatgacgctatcctgcaatcaggcctattttgcaagaggcagggcaaatggtcagaaatctcctatgtacagcccttcatgaccctatatcaaaacctaacaatctgtgaaactcccagaacctaccccccaaaggaaagttctaaggcagaagtagatattatagataaccttttacagggccacctggttctcagggtgagtagcgaccatccttgccaagcgaccccttgccaagtgcttctgaggctaaaactcagaagcaaacaccggggaccctacaagttcccctcatactcaagggggaacactgtattgaactctctctccagccctgctacctcttagggtagcaggagctgagaggccagtcctagtgaaggtccccttctctatataactgatacgcaacaatgtaaggagaagctaggaagctattctgagaatcttgggaaatttgctgatgggtttcaaactttgatctctcatggagagatgttcaatttattctagcaacctgttgcatcccttcagaaaaagaacaaatcttttgacgccacccaccaggaagcggatggattattcacctgaaaccctcagggcaaacactcaggaccagaaacagttcccactactgatcctcattgaaactacaacaccactgtaggaaacaaccaggctaaatttcttgaggctctccttggaggaatgagaaagggaataactaaggcagaaaattatgataaagtacagaaggttacacaaagcaagaagaaaaatctagccatgttttatggcaggttggaggaagcctttaaaaaaatatactaatctagtcccttcctcttcctgaagggaaaatactaatggcaaagcattttattagccaatctgcccctgacattagacataagctccacaagctacagatagggccacagactaaccaaaaccagcttcttgatacaatgtttatggtgtataacaattgtgacctgaaggaaggaaaaaggaaacagagtgaagaaaaacggcaagtcaaaattatggcagccatcattggtgatgtcctgaatgcccgaagagcatctaaggaaaatctgaagggccataaagataaagccagcagagactcttgcttcaaatgcaagaaaagtgggcattgggcaaagggatatactaagcccctgccaggtccctgctgtcaatgcaaaggtaccagtcattacccctggagaactgactgcccctgtgccaccatggggttgggtcagaaaactctagcagtgcaaaaggaggaattagatgaagactgaaggggcctgggatcttcctcactgcccctgtctaggaacatcgtagcaaccacatcatgcccaattcagcggtttatctagttgctatagtctagactaaaagttcccggatgacagggaccatgactgctttatctatttatctaatggtcatatgaaatggaagcaattagtttatctgagtctccagacctcttccttgtttttcacctaagtaccaggaaactggagaaactctcatctgagtaccaaccaaagacatctcttgcatgggggtaggaacaaacacaggatgacttatttctcttgcactgagacagaagcagaattaaccactcatgtcagccttacacaattctgttctggacattttcaaatttctcaaggatgcctaggtgattgtgagagggttctcagtgcccctgagctggtggcccaatgataagctagggatgagagactcaggctaaatgaagaatggaactgtcctggtagagctccacaacttgaattgcatgtcctgattagttagctcttgggtttaaaaaaaaaaaaaaaaaaggacaagaatactctactccagttagttagctcttgggtttaaaaaaaaaaaaaaaaaaggacaagaatactctactccagtatcacattttatgggtaggtatagtttggtcatggcactggataccttgtaagtcttaatctcttactctgaagatgcttgtttacacttacagattctgtaatcagattctatttacacctggagcccctcacataactgtagaaagtcactgcacaagatctgagaagttcaaaaacccgcaccctcaaaaaggggttttaatatttccatgttgacatctcacaatgcagaaaatgtcccccgtatgttttctgtacattctcaatcgaaagcctaaccttgacttgtgaatcccagacagaggttagaccttatgtgcagattctacgtcagataaacctggctctgcattcctgtgtgtcacagaaagtggagtacaatcaaaggagaggtccactcacagaggctgctctagctcattctaaatgatatttctacctaaaagggaaaagttgaggcaacataaatataaatagacagttttgggaggaccaagcttgaggattataacatgaaagcaaagactcaagttgcttggaatttatattttgcttaccaccagttacaagtgtatttgtaaaggtaaaaagaggacagaggctgttctctctttgggctggtacaaacttgtttgtcagaaactcttacttacaggaataacattaattattgactggatgtacatcattaaggcttagagtgtccagtgtggcattattaatttaattcacagctactggtggcaatagcaaacagtttcaaggtatgaatacatatagttgaaagtggggagaaagacataattgtgctctcattttaatgtctcttcaagtttgacaactaaaaggacctgcatttcccagatataagttttttaatttccaaaatttcaagacctagattcagaatttggagctgcagatttaggttctggatggataagagtatcagcaggtgttacctgcacatttgtgagcatttcagtaacaggaggaagtggaaagtggagattctcatgtctatgtgtatactcaatgcacacctgttactctaattgggtttgtgggccccatggtctctaaatcagtttcaggtctgaagatacaagagtaattgaaagaggtaaaatggctgattgctgccctgtgaagttcgtagaaatctggcctagcccctccagaagtgactgtagaggactatcaataccaaataggagagacaattctgcctgcatatttaggcgacagcatgcacttggcagcaaatttgggagtgactggaagcctgagagggtaagcccactctagagtagatcctggttggcaccttatatgtttctatcatatctggtaattccagacagtgtttgggaaatatcattaaaataaaaattttctggttgggggcaaggggagggagagcattaggacatatatctaatgcatgtggggcttaaaattagatgacaggttgataggtggagcaagccaccatggtgcatgtatacctgtgtaacaaacctgcacgttctgcacatgtatcccagaacttaaagtataatttaaaaaataataataatagaagaaaaaattttatccggccccagagaaactccacaatgatagaacattaagaaaactgttggccgggaacagtggctcacgcctgtaatcccaacactttgggaggttgaggtgggtggatcacctgaggtcaggagttcgaaaccagcctgaccaacatggtgaaacactgtctctactaaaaatacaaaaatcagccgggcatggtggtgggcacctgtaattccacctactcaggaggctgaggcagaagaattgtttgaacccgggaggcagaggttgcagtgagccgagatcaagccattgcactccagcctaggcgaaaagagcaaaactctatctcacaaataaaataaaataaaacaaaaataaaaataaaatcctgagtcacaaagaatgccaaaaagtttatttacctgttaatatgatacacatttatttttaaaaagcagagaaaaatatctacatataacctaaatgcttaaagaagtgagagatgggcaggccacaggggctcaacgcctgtaatcccagcactttgggaggctgaggcaggcggatcacctgaggtcaggagttcaagaccagcctggccaacatggggaaaccacatctctactaaaagcacaaaaattagccgggcatggtggcgggcatctgtaatcccagctactcgggaggctgaggcaggagaatcacttgaacccaggagacggaggttgcagtgagcctggtcgacagaacgagactccgtctcaaaaaaaaaaaaggagagagataagcaaaatattctttattattttcaggtataaaaacagagccttttggttgggtgcagtggctcacacctgtaatcccaccactttgagaggccaaggtgggtggatcacttgaggtcaggagttcaagaccagcctgaccaacatggtgaaactctgtctctactaaaaatataaaaattattagctgggcatggtggcacatgcctgtaatcccagctacttgggaggctgaggcacgagaatcacttgaacccgggaggcagaggttgtagtgggccaagatcatgccagtgcactccagcctgggtgacagagcaagactccatctcaaaaaaaaaaaaaagagagagagagagccttttatttctaacttaaattttctcttacaacagccaggtctctggatatgttgaactcttcgacatcttaattttagtagacactggattcaggcatctaaggagtagcattgggcacacagtattcacttgaaagaatgtttatggggaaaaaagcagaagagaaaaaggtgctataaaaaatccatgggtccacataaataaagcaacttcttagagacctatgaagacagttggattcttacacaaaaatagtgggaggctacaatacaccacagacactagtaaacaaatcactgaggcagaaaaattaacaaagatattaggacctaaactcaacacttgaccaaatagtaataaaatatctatagaactctccatctaaaaacaacataatatacaatgttttcaccaccacagggcacatactctaaaactgaccacaaaatcagaaataaaacaatcctgagcaaattcaaaaatttcaaaattgtatcaacaacatactcagaccacagcttgataaaaatataattcaatacaaagaaaaccacttgaaaccagacaactacatgcaaattaacctcaatatgaatgacttttgggtaaataataaaattaaggcagaaatcaagttctttaaaataaatgagaacaaagacacaacataccagaatcactgcaacaaaactaaggcagtattaagagggaaatttatagcattaaatgctcacatcaaaaggtagaaatatctcaatttaataacctgacatcctaaataaaagaatgagagaagtgagagcaaatcaacccctaaggtagaagaaaacaacaaataactaaaatcatatctgaactgaagaatatttagatgatgtaaaaaactacaaaaaagactaaaaaattagaagtaaatgttttgaaaaaactcagtaagataaataaaccactagctagattaatgaaaaaaagagaagatccaaaaaaaaaaaaaacacaattagtaatgacaaatggacattatcactgatttggcaaaaatacaaacaaggatgaaagtctacaatgagcacttctatgcacagtaactaaataatctagaagaaatgaataaattcctggacaaatacctcctccctagactgaacaaaaaagaaattgaacccctgaataaaccaataaaaagctccaaaatcaaattaataataagtagcctaccaaccaaaaaaagcccaggaccagacggacttacagctgaattctaccagatgtacaaacaaaagttggtattatttttactaaaactattccaaataattgagaaaggacttctccccaagttattatataagaacagcatcattctgataccaaaacctggcaaagacaaaacaaacacacaaacaaaaaacttcaggccaatatttttaataaatattaacaaaaaatcatcaacaaaatactgaaaaaccaaatccagcagcacatcaaaaagttaatccaccattatcaagtaggatttatccctggaacacaaggttggttcaatatatacaaatcaataaatgtcatttatcacttaaacagaactacagacaaaaaccacaaaattaactcaatagatgcagaaaaagctttcagtaaaatttaacatccttcatgttataaccctcaacaaactaggcattgaaggtacatacttcaaaagagttatctacgacaaattcacagccaacatactgaatagatacaagttgcaaacattttttttcttgaaaactggcacaagacggccgggcgcggtggctcacgcctgtaatcccagcactttgggaggccgaggtgggtggatcacgaggtcaggagatggagaccatcctggctaacatggtgaaactccgtctctactaaaaatacaaaaaattagccacgcgtggtggcgggcgcctgtagtcccagctacttgggaggctgaggcaagagaatggcggcgttaacccgggaggtggagcttgcagtgagccgagattgcgccactgcatcccagcctgggcaacagtgcaagactgtctcagaaaaaaaaaaaaaagagaaaagaaaaaaaagaaaaagaaaactggcacaagacaagggtgccttctctcaccactcctattaaacatggaattttgaagtcctggctgagcaatcaggcaagccgaaacaataaaagcacccaaaaagaaagaggaactcaaactatcccgggtgcagatgacatgactctacatctaaaaaaaacctatagtctcagcagaaaagttctgtaagctgacaaacaacttcagcaaagtttcagaatacaaaataaacatacaaaattagtagcatctctgtacatcaaccatatccaaagcaaaggccaaattaataatacaatcctagctgggcacggtggctcacgcctgtaatcccagcactttgggaggccaagaggggcagatcacctgaggtcgggagttggagacaagcctggccaacatggggaaacctcatctctactaaaaatacaaaaattagccaggtgtggtggtgcatgcctgtaatcccagctactcaggaggctgaggcaggagaattgcttgaacccaggaggtggagattgcagtgagccaaaatcacaccacttgcactccagcctgggcaacagagtgagactccgtctcaaaaaaaaaaaaaaaaaaaaaatcccatttgcagttgccacaaaaacgaatatctagaaatacagctaactagggagatgaaagatctctaggacaagaattacaaaacacttcttaaagaagtcagagatggccggctacagtggctcacgcctgtaatcccagcactttgggaggccgaggcgggtggatcacctgaggtcgggagtttgagactagcctgaccaacatagagaaaccccatctctgcctaaaaatacaaaattagcacggggtggtggtgcatgcctgcaatcccagctactcgcgagtctgaggcagatgaatcacttgaaccccagaggcgggaggctgcagtgaaccaagatcgtgccattgcactccagcctgggcaacaagagtaaaactgtcttggggggaaaaaaagtcagagatgacgcaaacaaatggaaaatcattttgtgctcattgatagaaaagttcggtattaatatggccataccaccaaaagaaatttacagatatgttatttctatgaaactatcaaaaatattctttttttttttttttgacggagtttggttcttgtcgcctaggctggagtactgtggtgaggtcttggatcactgcaacctccacatcctgggttcaaggctgcctcagccacccaagtagccggattacaggcatatgccaccacaccaggctaattttttgtatttttattagagacagggtttcaccatgttggccaggctggtctcgaacccctgacctcgagtgctccacccacctcggcctcccaaagtgctgggattacaggtatgagccaccacacctggcctcaaaaatattcttaacttaaaaaaaaaaaaaattaaatacatatggaaccaaaaaagagctctaatagccaaggcacttttctaagcaaaaataacaaagctggaggcattacattacccaactttatcttacaaagctacagtaaccaaagcagcatggtactggaacaaaaacagactcagacaaatgcaacagaatagagagccaaaaaataatgccacgcacttaaaaccatctgatcttcaacaaagctgacaaagagaaatacaggaataatttcctatttaattttaaatgttatttaaatttttaatgtaaacatttaaatttctggccaggcgtggtggctcatgcctgtaatcccagcactttggaaggccgaggcgggtggatcacgaagtcaggagatcgagaccatcctggctaacacggtgaaaccccatctctactaaaaaatacaaaaaattagccgggcgtggtggcaggcacctgtagtcccagctacttgggaggctgaggcaggagaatggcatgaactcgggaggcggagcttgcagtgagccaagatcgtgccactgcactccagcctgggcgacagagcgagactccgtctcaaaaaaaaaaaaaaaaagagaacaaaaattaaatgtaaatatttaaataatcttattaaaaataatgccacacacttacaaccatacgatcttcaacaaaactgacaaagagaaatatgggaataatttcctatttaataaatggtgcagtaataactatttagcactatgtacaaggctaaccctggatcccttccttacaacatatacaaaaattaacaagataaattaaagacttaaatgtaaaacttagaattataaaaaactctggaagataacctaggaaatatcattccagacacaggaaccagcaaattttataatgaagataccaaaagcaattgcaacaaattgacaaatgggatctaactgaagagtttcttcatagaaaactattaacagagtaaagacaacctacagaataaaagaaaatatttgcaaactatgcttttgacaaaggtctaatatccagaatccataatgaacttaaataagtttacaagaaaaaaaaaaaaacctcattaaaaagtaggtggccaggcaccacaacctacttgctcatgcctgtaatcccagcactttgggatgcagaggcaggtggatcacctgagatcaggagtttgaaaccagtctggccaacatggtgaaaccctatctctactaaaaatacaaacttagccaggcgtggtggcaggtgcctgtaatcccagctacttgggaggctgaggcagaagaatcacttgaatcagggaggcagaggttgtggtgagccgagattgcaccactgcactccagcctgggcaacaagagcgagactccgtacccccccccaaaaaaaaacattaataaaaacaaaatatggccagacgcggtggctcacgcctgtaatcccagcactttgggaggcctaggcgggcagatcacgaggtcaagagatcgagaccatctggccaacatggtgaaaccctgtctctactaaaaatagaattagctgggtgtggtagcaggctcctgtaatcccaactactagggaggctgaggcaggtgactcgcttgaacctaggaggcggaggttgcagcgagctgacatctgcacaactgcactctagcctggggacaaagccagactccgtctcaaaaaaataaaaataaaataggtacataaacatcatggaacactgtgtggccataaaaagagaccaagatcatttcttttgcagcaacatgtacagagctagagaccactatccttagaaaactaatgcagaaacagaaaatcaaatgcatgttattatttataaataagaactggctgggggcagtggctcaggcctgtaatcccagcactttgggaggctgaggtgggtgaatcatgaggtcaggagtttgagaccagcctggccaacatggtgaaaccctgtctctactgaaaatacaaaaattagccaggtgtggtgggcgcctgtaaccctagctacttgggaggctgagacaggagattcgcctgaacctgggagatggaggtggcagttagctgagatcgtgccactgcactccagcctgggcaacaagagcaaaactccgtctcagaaaaatttaaaaaaataataataataagagctaaataataagaacacatggacacaaagagaggaacaacaaaaactgagacttagttgagggtggagagtagaaggacaaagagaatcagaaaaaaatacttgtttggtgccatgcttagtacctcagtgacaaaataatctgcacaccaaaccttcatgacacaattttacctataaaacaaacctgcagatgtacttatgaaccaaaaataaaagttaaaagtaaaaaatccatgggtggaggagagtgcaatgtaagtggaaggactggtttgtactacagatagtggcttaggtgaggctacactgatttatttttgtgcccatgaaggcagaagagattatgaacagttggtcaaaaccctaggatggtggagaaaacagattactgctgcagattcagtgtctgcaggtggggatattccaggagacatagtcattttttgggtttttcgcaagaagcactaggataaacaatgctgttgtgaattttctgagggtggtacctagtcctgggaggggtgtgggcacgtcaatgtctagtgggtgtgtttgtgagtgggtggaaatcttgtggtggtagctgtgggaaagtggggtttgttatcacagctcttgtcctttaagttttcagtcctccctcacccttggaggagacctgaaatcacaggacaacgagcttgtgtacaggagagcagagcctcccattccaggcacccagagttccattccaggccaggcctctgtgatatcttttttctggcaccaaatctgtagagtttactgaacaccaagcaatcctccaacactcattgtctaacgtttgaattctgacaccacccagagtcagcatagaccctgattcagagcacaatccacaacactgtctttactgcagatgccagtcacaaacttcatgggctgatctatgcttctgagccactgtttaataactggggactcccagaactttcctcaagttcagtaatataacagagctattcacagaactcagtgaaacactgtagttatctttaccagtttattataaaagatacaactcagaaaaagtcaaatggaagaaatacataggaccaggaaaaaaggtggggaaaaatgaagcacatagataatcctggtaaagagctatgattaataaaattctccatctttgtattctccaaaaatagtttttcaaaagaaataccctcttattatgacttagatggtgctctctcttttctcacctgttgtagagccagacatagactctgcatattttcttccttttcttaaaaaaatcagctaaatttgtcttcagtggtcaaaataaaatacttcttaatcaaacttctttttcccacagcaactaaactttgagctacactcagtctgagccaacatacaaccccattttatgttcaccctaagaatatgctaacttcagggtaaaacattttctgatctaaaacctgactttttcactctctattcaccattcttctgctattttctttctaatcttgttttctcccctctgtggaaaaaaagtctgcctgaactttgcaataatagttggtacttcctcctgttgcaatactcctttggaattaaaattttttttacataaatctataactttaattttacaaaatttagaaactgcctcaaaacaataatacttatcttcagtaagaccttcacagcactttttcattttaaccttaactgcacctgcctgtgcatccccagcttcccagggctctcaagcttctctcaggataaagccttcttccatggctggggtgagcaggctgacatatctgcagaaaaggctccccagaaagaactaactgggcctttaataacctccttttgcaggctcaatattagctttagatgggctcaagctttaattttcatgtctgagttattcacttggtgtctgaaactatgtgtttgaaaaatccagcaaaattactgaaacgcagtgttagtatataaaaagaaaattttaaggtgcttccatttcatacctctgtaagaaaaccaaaagtatctacacctttcaaacaattaaagtattattttattatttattttaaaagttatgtagtaggccgggcacggtggctcacacctgtaatcccagcactttgggaggccaaggccagcaggtcacctgaagtcaggagttcgagcctagcctggccaacatggtgaaaccccatctctactacaaatacaaaaattagccaggcgtggtggtgcgcatctgtaatcccagctactcgggtggctgaggcagaagaatcacttgaatctgggaggcggaaggttgcagtgagctgagatcatggcactgcactccagcctgggtaacagagcgagactcagtctcaaaaaaaaaaagaaagttatctagtaaacaattagtcatatgagaacacttctaggaggtaccaaatttcatctcataacacttagcattaaattcagaaatcaagatcataggatatagaacagatattcactgccacaaatttatggtgcaaaaagaggaactatgttttcatgaatctatgtaactcaccaattatctactacattttcttgtggaaaggtatttaatttttacagccaaaaaggaagagagattgtctcgctctgactcccaggctgcagtgcagtggtgcgatctcggctcactgcaacctccacctcctgggttcaagcgattctcctgcctcagcctcccaagtagctgggactacaggcacgtgccaccatgcccggctgatttttgtatttttagtagagatgaggtttcaccatattgaccagactggtcctgaactcgtgacctcgtgatctgcccacctcagtctttcaaaatgctgggataataggtgtgagccaccccacctggcccttattcttttccttagtaggattctaacagctaaaccttggaattctgtttgaaattacccagccataaacacaactgacaaattttctaaactcactctgggaaagaaaaaggtaaataaaaacttttaacaaatagaatatataattaaattttttttttctgaaacccaactcttacatgctctttgcacatattttcttccctttcaaatgctactaataaaatgcaatttacatttaaaaaaactaaagtcactgactgggcgtggtggctcacgcctgtaatcccagcactttgggaggctgaggagggcggatcacgaggtcaggagatcaagaccatcctggctaacacggtgaaaccccgtctctactaaaaatacaaaaaaattagctgggcgtggtggcgggcacctgtaatcccagctactcgggaggctgaggcaggagaatggcttgaacccgggaggcagagcttgcagtgaccccagatcatgtcactgcactccagcctgggcaacaaatcgagactccgtctcaaaaaaaaaaaaaaaaaaaaactaaagtcaaaataagtgcactaatcttttcaaggtgacaaactagggagtggcaatgctgattagaaaacagatgtgttggcccagggcagtggctcatgcctgtaattccagcactttgggaggccaagaggggcggatcacctgaggtcgggagtttgagacaagcctggccaacacgggaaaaccccgtttctactaaaaatacaaaattagctgggcatggtggtgcatgcctgtaatccctgctactcaggaggctgaggcaggagaatcgcttgaacctgggaggcggaggttgccatgagccgagatggcaccattgaactccagcctgggcaacaagagtgaaaccccatctcaaaaaaaaaagaaaacaggtgtgtctaattcatgtgtcaagtcaggtcaccaatcacttgagagattctcccaccccatcctgctcacttaagtgctcaatgaccaccctctcactgcactatgcctcagtgactgccccaagtgcattttactttgcaagtttttgcatcatttcactgaggtcacttttttttgtcttttgaaatgctattttttctttcacaaatcttagacaattcaggggacagaaattatctctgtgtttttccctcaataccagcatctgattggctgaccagcaatatgtctccaagaaatggaagctgggttgagtaaaggcaatcttcatgtctcaaaggcttagtttttctttttttgagatggagtttcactcttggtgcccaggctggaatccaatggtgcgatctcggctctcagcctccaaaatagctcggattacaggcagccaccaccacgcccagctaatttttttgtatttagtagagatggggtttcaccatgttagtcaggctggtcgcgaactcctgacctcaggtgatccaccgcctcagactcccaaagtgctgggattacaggtgtgcaccaccgtgcacgcaagggttagtttttcaaaggaagagcgcaggggagagtcctatcagtccaagggcattcatctgtttccattgagaggctacactccatacctcaggttgttttatgaaagaaaataacccagtagattatattcactagacactcgagcagacatagccatggtagatatattggtttattcacagaaactactgaagcccaggaccagaaaaaactgaaggtggctgaggccacatcacccataaagtttccaaagggaaaccttgacccaaaaatattctgatactatctctgtgcctagagaagatttttaaaaatgaggcgaaaagattttttacaatacagtatcagggaattgttcttctttttcttctcataaaaaatattttcaaacagaaaacgatttttttaagtgccattcaatgtcaaaaaatgcttagttaaaatacagtatctaaagtgtacaataaaagacaaatagttgataatgtgaattagaaaggggaagctggcatttgagaatgtgagaagaaactggaaatttagtattttactgcaagtcatagttagtctggaggaatgggatgaggggtaggcttgagacccagcttgagagaactgtgaaaaatgcaggggaaaatcagtctcctgtggagtgtgaaaataactaagtagcaggcaattagacggaggttactctagtccctgggttcctattttttaaaaactctaactcaaatgcatttttttgcaaattactgaattgagggaaacaaaaatttaggcttaaccaatcataaactgccaattaacctctgattacataaccaggaaatgtccaccttaattgtacaagtcaagtaactatgaactgtacctaaccaattatttaatttggttttcttcatcatgtacctttaaaagtctttccttcaagctgctctcataaagtcacaagctccaaaccacagctgaatgctccacaatttttgaatcactctttgattaaattctccaatatttttgtggtgatccccataatttatttatttatttaacttatttatttatatattttttaagacggagtttcggtcttgttaaccaggctggagtgcaatggcgtcatctcggctcactgcaaccgccacctcccgggttcaagcggttctcctgcctcagccttctgagtatctgggattacaggcatgtgccaccacgcccggctaattttgtatttttagtagaaacggggtttcaccatgttggtcaggctggtcttgaactcctgacctcaggtgatccacccacctcggtctcccaaagtgctggtattactgacctgagccaccgcgcccggccctcccataaaattttaataggagaaaacaggaactgggaaccccacggaccaaaactcttcccattaatgaacccgcaccctgagtcaggattctccggtgacggccctcctgtggtccctgcacaatctgagagaaatgcggcgctgcgggtacagagctgcccagagagggctacaggccagggcacagtcactaggcagagaagagacgggatgccccggggctggctgtcagcgcgccgccatcttatggctgcaggggactgagccgagctggggaaggagaactcggggtgcagattgtggagctgactgcggggaggcctgagtcccgccatagccatttcccacgggttccaaccagccccttccccctctcgggatgtcgcacccgtaactctcaccatttctaggcttccagggggtcctggagtcttagctgtggatctctcaatttctgcaggtcacaggcccacagaggctggacctctaggagcagaggacacagagcaatgaaagcgagacctggagctccggctgcagcgagagacaaaggcgccgccaaatcccggaagccatcttgtctgctccagctgcgtgcctgattggacggttcccagcccagcgtgcctgattggacaacgtttaaggtcctgacccttcaggccctgagtgacagaagatgtgatcagacactgggctgagtgaagactgatagcctgcgctgcagccttttcagccggggcttcctcttttagctgagccaggcccatcccatagggtatttgtatttaaccttgtgtataaggtcatatacatttataaatgatatatggctactcacaaagaaaaataatataataataattattttagaatttcagactttatgaccttcctggcttctggtcctttgagtaggcagcctgagaattttaaaaagaggcaatcctcaaataaaatgtgagccacatgtgaattttaaattttctagtagtcaaactttaaaaagaaaaaaacaagtggaattgattgtaacaatctaacccaatatatccaaagtactatcattttagtatgagagcaatatgaaattattgatgaaatacacatatatatgtatatatgtgtatacacacacacacacacacacacacacacacacacatatatggaactaaatctttgaaaataactctattttacctaacacattgcaattcagaccagccacattccaggcacccagtagccacacgtggccaatagctgccacattaaaatgcagctctgatgtcaggggggtgaagaagagcctgaacatcccttttttgccagaggtgaggggacagcctctctctaccaacatctctcttcaattccaaggaaaaaacagttagtgaccatagaaagaacagaggacagatagaataaaataaccacaggtcgacctgtggttacctctggttattttattaactactgctgcccacctgttgctcaccttaattccaaacatcagacagtgaacaaagaatgatgaagccacaaaacaagaaaactctgtatcttcagatctgtccacagtcttaacctccaatgtttagatatggagaaaatagattaaaggcaaacttattttgctatttggccttggccctaacggtcagcctgtggttatctgttttctcctgtggtgtggtgaactgtgtgagtataagcaccaatcacacgcagacatgtctacatgtatttttgcattattcaatattctcttacaagacataagactttaagtcaagaataaaggtaatgtgagtcttttttcttgcattggcgctacccacagggtgcatcatgacatattgctaagttctgcattcaggttatgtggctctcttcttttacccaggcccagaatattttgcacaatagaacatattactaggcccaacatatataaaatgggaggcccttgcctgagccttttttacagagggccttgtgacatatctctgcatcaatcacctaagagatgcaactgtccatttttccctgcactctgcccacaggaaaaattgtgacttatcattaagcctaggtagcaggtgatgtgtctctcctgcctgggccttgagccacagaaagcattgttacctattgctgggctcagcacccaggtgatgtgactctgctgcctgtgtcctgctgtcaggagaaggttgtaacatattcctatttaggtgatgtgacactcctgtctggtccctgccctcagaaaatattgtgacatattcctggcccaagtatgagagtcaacatgtccttcgggaacacttcaggacctttaaccttgggtacatcatctcacaattcagaagggcccttccaaactcaggaatgagcaagtggctgttggctgtctaggttctccatgagttcacatttattactgaatttatgtctgcttaaatatcaggtttgtttcttcaatttaggtgtataacactgataactgaggggtaatcataggtaatctgacttgaatcacaaagtttattcaaatggcatatctaaaaaattttagtactggtttatttaacacaaaaatgtgtcagaggccaggcgcagtggctgatgcctataatcccagcacattgggaagccaaggagggcagatcacgaggtcaagagatcaagaccatcctggccaacatggcaaaaccccgactctattaaaaatacaaaaattagttgggtgtggtggcacatgcctgcagtcccagctactcgggaggctgaggcaggaaaatcgcttgaactggagaggcggaggttgcagtgagctgagatcacgccactgagactccagcctggtgacagagcatgactctgtctcaaaaaaaaaaaaaaaaagtggcagagtattttcctgatgttcaactatttttgtttttcctgaattagcagttttatgaatcagtgtgttctttagaattctcacaatccttacccagtccaaacaatataattttaaaattatcagaaacctgtactcaacttgtctgggctattttcatcttttcatgaatctccttacagacacagtactctaggattttgcatgtttttgaagtttgtagaaactacatcagaattaaaccattaactgtagaaatgacttcaaataattataaagaaacaaatgaaacaaacttattatgtctgtgacctgcaataacttatcataaccataattatgactaatagcttatactcagatatataagatttttagaaatttcataatattatgaaataaatgttaatatatattaaaatagaagttgaagaagatcaaacattatctttaattcaacaatgcttttcatgtaatttaacatatcaaataattacgttttttactcttttggatgttgcatagaccctctgtagcatccaaaagttaggggtctaggccgtgcccagtggctcacacctgtaatcccagcacttagggaggccaaggcaggtggatcacctgaggtcaggagtttgagaccagcctggccaacttggtgaaaccctgtctctactaaaaatacaaaaaattagctaggcgtggtggcaagccgctgtaatcccagctacttgggaggctgaggcaggagaattgcttgaacctgggaggtgaaggttgcagtgagccgagatcatgccattgcactccagcctgggtgaaagagtgagatgctgtctcaataaaaaagaaaaaaaaagttaggggtctaataatacataaaatttgtgttcaagagaaaattgttatactttttaattagtgtattatcaatggtaaagctaattttaataaaaccttacaagtaaattcatcaaatttgtcatttttggccaatctagatttccataaatatgttataatctctcataatcatttaaactttttatattttatttttatctactattttattttttcaatttgacacaaccattaagtaatttcaaactacactaaatgtttctaacttccttcatcaaaagcattttttgctttcgtttctacactctatgcagaattgtttttcgtacatctaattgatttaattatatataaatcacattaactctttttttttaagatggagtctagctctgtcacccaggctggagtgcaatggcgggatctcagctcactgcaacctctgcctcctaagttcaagcaattctcctggctcagcctccagagtagctgggactacaggcgcatgccactatgcctggctaatttttgtattgttagtagagatggggtttcaccgtgttagccaggatggtctcaatctcctgatctcataatcctcccgcctcagcctcccaaagtgctgggattacagacatgagccacagtgcctggcctcattaactcttaacaaccttttagtgaaattcctaggaagcaattttgaactgtttcagtatttgtagacaaaatttattttatattttaaataaatattttttaaatttttttaaaataacaaatctaaatatatttagcttttttatattacataaaaataagattctgatcaggcatggtgtctcatgcttgtaattccagcactttgggagaccaagacaggaaggctgtttaagcccaagaattcaagtccagctggggcaacatggcaaaatcccatgtctacaaaaaatacaagaattagctgggcatggttgcctgcacctgtaataccagctattcaggaggctgaggtaggaggactgcctgagtccagaaagttgaggctgcagtgatccatgatgaggctattgcaccccatcctaagtaatagagtgagaacctttctttaaaaaaggccaaagcacatgaacttaatgttatggggttttttttggtttattattattattttaatagttttgggggtacaggttatgtttggttacatggataagttgtttagtcgtaatttctgagatttgggtgcacccatctcctgagtagtgtacactgtatccaatgtgtagtctttcatctctcacccacctcctgcccttccacctgagtccccagagttctgtgtataattcttatgcctttgcataagagcttagctcccactatttggtttttcatttctgagttacttcacttagaataattgtctccaactccatccaggttgcttcaaatgccaatattttgttcctttcttgactgagtagtatttcattgtttgtgtgcgtttgtgtgtgtgtgtgtgtgtgtgtgtgtgtgtgtatatatatatagtgatatatatgcgtgtatatatataatgtgaaatatatatatatatatatatatatatatatatatatatgcacacatatatatcacatttctttatccactcattggttgatacgaatttaggctggttctgtatttttacaattgcaaattatgctgctgcaaacgtgtgtgcatgtgtctttttaatataatgatttctttttgtgtgtgtagatacccagcagtgggactgctggatcaaatgatagttctatctttagttttttgggtttttttttttttttgagacagattctcactctgtcacccagctggggtgcagtggcacgatcttggctcactgcaacctctgccacccgggttcaagggattctcctgcctcagcctcccaagtagctgggattacaggcgcctgccaccacgcccggctaattttttctgtatgtttagtagagacggggtttcaccatcttggccaggctggtcttgaactcctgacctcctgatccacctgcctccgcctcccaaaatgctgggattacaggcgtgagccacccctcccagccctacctttagttctttaaaaaatcttcatactgtttttctctagtggttgtactagtttacattcccaccagcagtgtaaaagtgcttttgtttcaccacatttctgtcaacagctagtatttttaaattttttaattaagaccattcttgtagtgtggggaaaagcaagagagatcagattgttactgtgtctgtgtagaaagaagtagacataggagactccattttgttctgtactaagaaaaattcttctgccttgagattctgttaatctatgaccttactcccaaccccgtgctctctgaaacatgtgctgtgtcaaactcagggttaaatggattaagcgttgtgcaagatgtgttttgttaaacagatgcttgaaggcagcatgctccttaagagtcatcaccactccctaatctcaagtacccagggacacaaaaactgcggaaggccgcagggacctctgcctaggaaagccaggtattgtccaaggtttctccccatgtgacagtctgaaatttggcctcctgggaagggaaagacctgaccgtcccccagcccgaggaaggcatctgtctcctgcccgtccctgggcaatggaatgtcttggtataaaacccgattgcacgttccatctactgagatggggaaaaactgccttagggctggaggtgggacaggcgggcagcaatactgctttgtaaagcattgagatgtttatgtgtatgcatatctaaaagcacagcacttgattctttaccttgtctatgaatgcaaagacctttgttcacgtgtttgtctgctgaccctctccccactattgtcttgtgaccctgacacatccccctctcagagaaacacccacgaatgatcaataaatactaagggaactcagaagctggcgggatcctccatatgctgaacgctggttccctgggtccccttatttctttctctatactttgtctctgtgtctttttcttttccaagtctctcgttccacctaacaagaaacacccacaggtgtggaggggcaacccaccccttcattgtaggagtaaggtggtatcacattgtggttttgatttgcatttccctgatagctagtgatgtttagcatgtttttatatgttttttggccatttgtatatctccttttgagaattgtttattcatgtttttagcttactgtttcatgggattttttttttctgattcttttgagttccttgtagattcagaatatttgtcttttgttggatgaatagactgtgaagattttctcccacttggcggcttgtaagtttactttgctgattatttctattgtggtcaagaaggtttctggtttaattaagtcccatttatttttctttgtttttgttttatttgcttttgggttcttggtcatgcactatttgcctaagccaatgtctagaacagtttttctgatgttagcttctacaatgtttacagtttcaagttttagatgtaaatattttctccatattgagttaatttttgtataagataagagatgaagattcagttttattcttccacatgtggtttgccaattatcccagcagcatttgttgaatagggtgtccttttcctaccttacatatttatttactttctcaaagatcagttggctgcaagtatttggctttatttctgagttcactattctgttctatttgtctgtgtgtctactttcataccagtagcatgttgttttggtaactatagcctggtagtatagtttgaagttaggtaatgtgatgcctctgattttttactttttgcttagtcttgctttggctatgtgggctttttttaggctctatatgaattttaggatttcttttcctaattctgtgaagaacgatggtggcattttgacaaaaactgacttgtagaatgctttcgtcagtatggtcatttttacaatattgacactacctatccatgagcatgggatatgtttccatttgtttgtgatatctatggtttctttaagcagtgttttgtaattttctttgtagatgtatttcacctccttggttaggtatatttctaattattttatttttttgcaggtttttgcaacgagttgagttcttgattcgattttcagcttggtagctgttggtgtatagcagtggtgccgatttgtatacattgattttgtattctgaaagtttactgaatgtattcattagatctagaagctttttaataaatctctagggttttctaggtataaaatcatgaattcagaaaacagtgacagcttgacttcctctttacagatttgaatgcaatttatttatttatttttattgtctaattgctccagctaggatttccagcactatgttgaatagaagtgatgtaagtgaccattcttgtcttgttccagttgtcaggaagaaagttttaatttttcctcattcagtataatgttggccatggatttgtcacagatggcttttattaccttaaggtatgtacccccgtgccgattttgctgagagtttcaatcataaaaagatgctggattttaaatatgtttttctcgtctgagtgtggtggcttatgtgtgtaatcctggcagcttgggaggccaagactggtgggttgcccgagctcaggagttcaagactagcctgggcaacatggtgaaactctttctttaccaaaatacaaaaaattagctgagtgtagtggcgcacacctgtacttttaattttagctacttgggaggccgaggcatgagaatctcttgaacccgggaggcagaagtttcagtgagccaagatcatgtcactgcactgcagtgcaggtgacagagatttcatctgaaggaaaaacaaatgttattctgcatctgttgagatgatcatatggtttttgtttttaattctgcttatgtgaggtatcacatttgttgacttacgtatgttaaaccacccctacatccctggtataaaatgcacctgatcatggtgtattattatttgatatgctgttgtatttggttagctagtattttgttaagaatttttgcatctatgttcatcaggaatattagtgtgtagttttgtgctatgttctttcctggttttggtattagggtgatactggcttcatggaatgatttaggaaagatatcctctttctctatttttgaaatagttttatttaggttggtaccaattcttccttaaatgcctcatagaattcagctgtgaatccatctggtcctggacttttttttttttttttggaaattttttattactgtttcaatctcactacttgttattggtctatgcagagtttctacttctttctggtttaatcaaagagggttgtacatttccaggaatttatccagctcctctaggtttcctagtttgtgcatgtaaaagtattcatagtagccatgaattatcttttgtatttctgtggtactggttgtaatatctcacattttgtttctaattgagcttatttagatgttctttcttcttttcttggttaatctcactaatggtctattaattttggttatcttttaaaaaacaaatttttgtttcatttgtcttttgtgctatttaaaatttcaattatgttaattcttctctgattattgtttgtttttttgtttgtttgtttgtttttgttttttgctgggttggggtttggtttgttcttgtttctctagttccctgaggtgtgaggttagattttcaatttgtgccctttcagactttttgatgtaggcatttaatgctatgaactttcctcttagcaccacttccgctgtattccagaggttttgataggttgtgccactactattgtttagttataaaaaaatttaaatttccatcttgacttcattgctgacacaacaattattcaagagcaggttatgtaatttccatgcatttgcatggttttgaggatttattttggagttgatttccaattttattccaatgtggcctgagagaatacttgacataattttgattttcttaaatttggtgagacttgttttgtagcctaattatatggtctattttggataatgttttatgtgctaataaatagaatgtatattcttcagttgttgagtagaatgttttgtaaatatctgttaagtcaatttattctagagtatagtttaaattcactgtatcttagttgactttctgtctagatgacctttctagtattgtcagtggggtattaaagtaccccattattattttgttgctctctatctcctttcttatgcctagcagaaattgttttataaatttgggagctccagtgttaggtgcatatggatttagaattgtgatgtcttcctgtttggactagttcttttactattatataatgttattctttgtttttttgttttgttttgttttttaccattgttgctttaaagtctgttttgtctgctatgagaatagctactcctccttactttttgtttccatttgcatagaatatctttttccatttctttgccttaagtttatttgagtttttatttgttaggcaagtctcttaaagacagcagatacttggttggtaattttttttcttcttttgagatggagtgtcactcttgttgcccaggctggagtgcagtggcacgatcttggctcactgcaacctttgcctctcaggttcaagcaattctcctgcctcagccccctgagtagctgggattacaggcgcacgccaccatacctggctaatttttctattttagtagagatggggtttcaccgtggtagccaggctggtttcggactcctgatctcaggtgaaccacccacctcggcctcccaaaatgctgggattacaggcgtgagccaccgtgcctagccataaatttttatttattctgccattctgcatcttttaagtagagcatttaggttattgacatttaatgttagttttgagatgtgaggtactgctgtattcatcaggttagctgttgcctgcatatctttgagtttttttgttattgttttataggccttgtgagacttatgcattaaggaggtactattttggtgtattttgaggttttgtttcaagatttagaagttcttttagcatttcttctattgctggcttggtactggtaaatcctctcaacacttgtttttctgaaaatgactttatctctccttcatttatgaagcttaccctcactggatacaacattcttggctaaaaattgtgttgtttacggaggctaaagacaggactccagtcccttctttcttgtagggtttctgctgagtaaactgtgttaatctggtaagttttgtttatagggtacctaatgcttttcctcacagctcttatgattcttttcttcatcatgaatttagataacctaatgactacatgaataggtgatgatctttttgtgataaattttccaagtgttttttgagcttcttgtgtttggatgtctagatcattagcaagacctgagaattttttctcaattattcactcaaataaaatttccaaacatgtaaatttatctttttgtttttttcaggaccaccaattactcctaggtttggtcatttaacataatcccaattttcttagaggctttgttcattttgttgattctttcttctttgtctttgccagactgatttaatctgaaagacttttcttcaagctctgaagttctttcttcaacttgttgtagtctattgtttaaactttccagtttattttgtatttctgtaagtgtgtctttcatttccagaagtggtgattgttttttaatttatagtatttattcctttggaaatttttaaattcatatcttgtattaattttttaaatttctttaagctggttttcttgttcctctggtttctctagtagcttaataatcaactttctcaatttattttctggcaactcagacagttcttcttggtttagaatgattatagaagagctagtgcaatattctggggttgttatagaaccttgttttgtcatattggaattacttctctggtttcttctcatttggctagactatttcagtggaaagatcttggactcaaaggctcctgttcagattcttctgtcccatgtagtgatttcttgatgtggtgctttctcacttttcctagggatgggctttctgcaagtcagactacagtgattgttattgttcttctgggactagtaaaccagtggagctctacagctccaggctgatattgaggaatgtctacaaagtgtcctgtgatgtaatctgtcttcaggtctctcagccatgaataccagcacctgcttcagtggaggtggcagggaagtgaagttgactgtgtgagagaccttggttgtagttttatttagtgcattggttttctcaattgcttgttatgcaagcagtgaatttgtcatgtggacagactcaggacctctggttagccaggatgttacaggtggtggaattagtttttctttttttttttctttggagcagggctgttctgttacgagtcgctgttatggcttgtgtcagttggcctccagccaaaaggtggtgctttcaggagaacaccagctgtggtagtagaaagggggtatagacttgccctagttaaccaggatacccgttcaggattctcaggtgatgggtgggaccatagatcttccaaaagttaatttattttgccttcggctaccaggttgagtagagaaaaatcatcaggcagaggcaggattagaccggtctgagctcagactctcagggggtgtggcttgctgcagccactgttggaggagaggtggttctcaagccaatggagttatgttttaagggaggttatggctgcctttgctgcttcatacagagcaccaagaaaagcgagaaaaagctggcagtggcaggcctcacccagctcccatgcagccagcaaggcctgtctcattccattcccaccctgtcctgccaaaagcatggagtttatatcaaggcagccagcgtgcagagttgagatcttgccccaggctacatgcctatccctgagaaagtcagaaaggctttcaggcttcacccctccccacctgcccacacacttagctgcacagcttctgtgcttatatctgcacttcctattcacttctgcagactctgcgcagtaaaatttatgcttggtcaaaattattgcacagttcactaaaagcttttttaatttttttggcccctccctaattctgctggctgcctttcacaaagacccttgtgagataaagtcaggtatgactcttttggtcatgagctggggactgggaatgcctatgggctctttccctggctgcttcttttatatttcactcagctccctaaattcatttcagctctaggtaaggttaaatacatttcctttgatctggatttttcaggtccccctgtggggatgtgtgttcaaaggtagactttctttctcttacactttggggaactcacagttcttcagctgtgtcacagagtttgcagtaacaagctgcttttttcaaagggtctgtgaaatcttttgttttttcttggtatgttcctgcagtggttatgtcagaggcgttcgaaacagagcaactccattttgagtgagggctacaaaaatgaggctgagacgtcgggcgcggtggctcaggcctgtaatcccagcactttaagaggctgaggcgggcggatcacgaggtctggagatcaagaccatcctggctaacacggtgaaaccccgtctctactaaaaataccaaaaaatagccgggcatggtgtcgggcgtctgtagtcccagctactcgggaggctgaggcaggggaatggcgtgacccgggaggcggagcttgcagtgagccgagattgcgccactgcacgccagcctgggcgacagagccagactccgtctcaaaaaaaaaaaaaaaaaaaaaaaagaggcttaggcttgctgggctgtatgcccagaaaattaggcattcctagcctctaaatgtttatggttaagggaacaaattaataatgtttaccaaacagactcagacttgggtgtgtccagatatcctgacatctggagaacaaaggcattcctaattttgctttaaagataataatatcgattctcacaaaatatagtaagaaaattaattatgtattacaaacccttgtagcagaacacatctccccacatatacaagcattgtacctagggggatgcattcttctcttactttcaggaacgtcctgttttgtctatggactagctgtcctttcaccactttactttcttaataaacttgcttttgctttgcactgcggacttgccctaaattctttcttgcgtgagatccaagaaccctctgttggggtctggatcgggacccctttcctgtaacatgtttctggtgaccacagaagggactatagtgcagaaaccctgacccaatggctacctttgcctaagtgttgaggtcctgtaacatctttctggtgaaccacggaagggacgatactaaagaaaccctccaacccaaaggaaataggctgcagcactgattggatgactttgggtaagtggtggggtacccggttaaagaataggattgggttagaggcccctcttaataaaaggaaagaatgcttgactgaccccgacgtcagacgcctgatttaggagagttagagtcccttctaaggtttagggacctcttggtaaagtccctctcagctgaaaacgggcttggcactgcaggctatgctctttgtattaatctgccttctccttgctgcatgaatcaatttcttgggtgctgtctctgtttcattgtcatgattttattttattttattttttagatgtgtctcactctgctgcccagtctggagtgcagtggcgcgatctcggctcactgcaacctccacttccagattcaagcagttctactgcctcagcctctcaagtagctgagactacaggcgcttgccaccatgcccggctgatttttgtatttttagtagaggtggggtttcaccatgttggccaggctggtctcaaactcctggtttcagatgatccgccggcctcggcctcccaaagtgctgggattacaggtgtgagccaccgagcccggtcttcactgtcattttcaggaaactttaactgatcttagggatgttaacttattctttttctgtgtgcctcctgatttccgtccgtttgcttgtgaaacattgggaacaaaaagcattgaaggctccgtctccaaaatggctaattgagatttagtatttaacagctatgagcaataaaattacatagatgtggttttgctttgttgctgctatagtgactaggcgtgatcgagaagcactaggatggaaatcagggaacttttctccttgctgttttgtttcactttgcacactaaaaatacaattctttcctttcttggattcaggcaaactggctctgcttgtttaatccacactgtcgctattgcccagaacctgcttgctctggtcattcccatctaaatcttcttcatttcctttgccttattcgacatttttgtcaaagtccatttgtggtttaagattcatggcttggccaggcgcagtggctcacgcctgtaatcccagcactttgggaggccaaggcaggcggatcacgaagtcaggagatcgagaccatcctagctaacacggtgaaaccccacctctactaaaaatacaaaaaattagctgggcgtggtggcgggcgcctgtagtcccagctactcgggaggctgaggcaggagaatggcgtaaacccgggaggcggagcttgcagtgagcccagatcgcaccattgcattccagcctgggtgacagcgagactccgtctcaaaaaaaaaaaacataaaataaaataaaataagattcatggcttggctcacttatgttagttggataatgtgaaacatgtttgatgagagaaaaagaagaaaaagagctagacatgcaagatgatcctttaatgcaagccccccccccgcccccgcccccgcccctggttcagcgtgcagttttgagtggagcagacccttctgtcacctctaaaggttcagatgtgtcggtcctttcttcctctagcccacctgaaagttctgttgataatccttcatctcctcttccttaccggactagtccctctctacacccaccactccctgaggaactgagcccaacgagtactactctagtggagctgcctatcaacctccaaagggaaatctgtccacttacagaggtggcaaatggggaagaaggcactgtgagaggacatgtccccttttctatgtctgatttggctctatgtaaagagaagtttggtcatttctctgaagatccaggaaaattcctagatgagtttgagaaattaactctgacctatagtttaactggacaggatctgcacattttgttgtctctgtgttgtacagtaaaagagaatgcattttggtgacagctagggcgcatgcagatgaggtattgtcttgaaacctgaaccataatatatatcaggcaggaggttcagcagttcaagatcaagatccacagtggaactatcaaagaggcagtgaggacttggggtggagagagaatatggtcacttattttttgaaagggatgaagaaatgtatgaaaaagcctgttgtgggaggccgaggcaggcagatcacaaggtcaggagatcgagaccagtctggctaagatggtgacaccccgtctctactaaaaatacaaaaaattagctgggcgtagttgtgggcacctgtagtcccagctacttgggaggccaaggcaggagaatggcgtgaacccgggaagtggagcttgcagtgagccaagatcgtgccactgcactccagcctgggcaacagagcgagactctgtctcaaaaaaaaaaaaaaaagaaaagaaaaagaaaaagtctgttgactataaaaaggttaaggaagtttctgagggcaaagatgagaatccaactttgttcaagggcgtttagttgaagaaatcgggatatatactaacattgatcctgcctcaagggaaagatgaaccattctgggagtacattttataacccagtctgcccctgatatccatagaaacctattaaaagcagctgtgagtccccaaacttctaaggaacagctgtggatatagaatttttagtttttaataacagggacaaagcagaggaagcagaaagtgcaagaaggacctcccacaagcacggctcttggctgcagccttaagctcacatcaaacatgggattgcctcctggctcttggcctgaacaagggaagctgaaaggtgggaagcccaaagctgggcatctgagtcaccatgctttgggcataaatcagtgtgcacattgtaagaaaactggccattggaaaagggattacccagcattctgaagggagccatcagcacccaaacccatgatggctgaaatagccaggcaagcccaagagcgatgggactgagaccttcagccacagctcctgttggacaactaactatatctatggaggagccttgggtaacccttgatgtggcaggtaagaatattacattccttctggaatgctaactctgttttgacccaccatgttttacctatcctttaagctgctcttcagactttgaatgccccaccccttgttgggaagggatctgttaattcagaataaatatcagtgatatggtttggctgtgtccccatcaaaatcacaacttgaattgtatcttccagaattcccacatgttgtgagagggacccagtgagaggtaattaaataatggggaccagtctttcctgtgctattcttgtggtagtgattaaacctcaccatatctgatgggtttatcaggggtttctgcgtttgcttcttcctcatttttctcttgctgccaccacgtaagaagtgcctttcaccttccaccatgattctgaggtctccccagccatgtggaactgtaagtccacttaaaactctttttattgccagtttcaggtatgcctttatcagcagcatgacaatgaactaatacagtaaattggtaccagtagagtggggcactgctaaaaggatacccaaaaatgtggaagaagctttggaactgggtaacaggcagaggttgaaacagtttggatggctcagaagaagagaggaaagtgtgataaagtttgtaacttcctagagacttgttgaatggctttgcccaaaatgctgatagtgatatggacaataaggtccaggctgaggtggcctcagatggggatgaggaacttgttgggaactggagtaaaggtgactcttgttatgttttagcaaagaggctggtggtattttgcccctgccctagagatttgtgaaactttgaacttcagaaagatgatttagagtatctggcagaagaaatttctaagcagaaaagcattcaaggggtgacttgggtgctgttaaaggcattcagttttacaagggaagcagagcataaaagtttggaaaatttgcagcctgactatgcaatagaaaagaaaaacccattttctggggagaaatacaagctggctgcagaaatttgcataagtagcaaggagcctaatgtaaatccccaagaccatggggaaaatgtctccaggccatgtcacagaccttcatggcagcccttcccatcagatgcctggaggtccaggagcaaaaaatggttttatgggctggccccagggttcctgtgctgtttccagcctaggaacttggtgccctgtgttccagctgctccagccatggctgaaacgggccaatgtacagctcgagctgtgcctttagagggtggaatccccaagcctcagcagattccatgtggtgttgagcctgcaggtgcacagaagtcaagaacagaggtttaggaacctctacgtagatttctgaagatgtatggaaacccctgaatgcccagatgaaagactgctgcaggggcaggcccctcatggagaacctctgctagggcagtgtggaaggaaaatgtggggtcagagcctccacacagagtccctactgaagcaccatctaatggagctgtgagaagagggccaccatctttcagatcccagaatggtagatccaccgacagcttgcactgtgcacccagaaaagccacagtcactcaacgccagcccatgaaagcagcaaagagaagcccgtactctgcaaagccacaagggtgtagctgcccaagacaatgggaaaccatcttttgcatcagcataatctggatgtgggacatgaagtcaaaggagatcattttggaactttaagtatttgaccaccccactggatttcggacttgcatggggccttcagtccctttattttgaccaatttctcccatttggagtggctacatttacccaatgcctttactcccattgtatctaggaagtaacgaacttgctttgattttactggctcataggtggaagggacttctctggtctcacatgagaatttaaactgtggacttttgagtttatactgaaatgaattaaaacttcaggggacaggccgggcatggtggctcacgcctgtaatcccagcactctgggaagccaaggcgggtgggcggatcacgaggtcaggagattgagaccatcctggctaacatggtgaaaccccgtctctacttaaaatacaaaaaaattagccaggcatggtggcaggtgcctgtagtcccagctactcaggaggctgagccaggagaatggcatgaacctgggaggcagagcttgcagtgagcagagatcacgccactgcactccagcctgggcgacagtgctagactccctctcaaaaaaaaaaaaaaaaaaaaaaaacaactttgggggactatttggaaggcatgacgggttttgaaatgtgaatgtatgagatttgggagagaccaggggcagaatgatatagtttggctctatgtccacatgcatatctcatcttgtagctcacataattcctccctcttgtggaagggacccagtgggagaggattgaatcattgaattgtagatgattgaacagcatcttttctgtgctgttctcatgacagtgaatgggtttcatgagatctgatggttttaaaaacgaaagtttcttttcacaagctctctgtctgctgccatccatgtaagaagtgatttgctcctccttgccttccatcatgattgtgaggcttcccaagccatgtggaactgtaagtccaataaacctccttcttttgtaaattgcccagtcttgggtatgtctttatcagcagcagcataaaaatggactaatacattaatttatattttatttagttagaacattccattttcatttattaattggagaaccctacatgagcctacatttctttagttattgttcctttcactttttataaatgacataagtaaatttattgattgattgggccaatttgttcaggtcagtactagggagacttcataagtcatgaggatgtttctatacataaatgcagcaaacaaacatgacagggcttgctgtgtcacagatgctttataatacaccataaatattcctgctggagttagtttgtaacttcaagtcagggatggaaaatagcaatggtgaagaaataacatttattcttcatgtggagaggacatgttttccaggctgcaaagctgactcttgctgaatttaaagatcaattctgcctttttcctttcctaattattctcagttttgtttgtcttattatggggattccaagaatgtatgcatcacagcccttctttatttattgtgtattggtgacagttttctcactgttgtctttatgccatgacattttacatggtactttgtaggttctaatttaaaagttggtactttttattgcacagaaaattgattttaactagaaaatttatttagcaatgtaactttcagattagttaattaaaataagaggcatatactgtccacaggtgagaaaattacatcagttagcattgtttttctttgtttgtcaaagaaaactcttattcaattcttttttttttttttgagacagtctgactctgtcacccaggctggagtgcaggggtgaaatctcagctcactgcaacctctgcctcccaggttgaagcggttctcctgcctcagcctcctgagtagctgggactacaggcgcgtgccaccacgcccagctaatttttgtatttttagtagagacagggtttcaccatgttggccaggctggtcttgaactcctaacctcgtgattcacccatgtcggcctcccaaagtgccgggattacaagcataagccactgcacccagcctacattcatacacaaattctggcaaatataaaatttgtgagatactatatctttgaaattagacttttgagagggttaatgatacataattgttttaaatttttattttattttattttattttggagagggagtctcaccctgttgcccaggctggagtgcagtgatgtgacgttggctcaccacaacctccgcttcccggttcaagcaattcttctgcctcagccttcaaagtagctgggacaacatgcgtgcaccaccatgcccggctaatttttgtatttttagtggagacggggtttcattatgttggccaggctggtctcaaattcctgacctcgtgatccacccacctcagcctcccaaagtgctgggattacaggcatgagccaccctgcccggtcaatgatacataattttaaatttaattttgctgtgatatacttacagcacaactttctttttttctttctttcttttttttttttgagacagagtcttgcactgttgcccgggctggagtgcaaaggtgtgatctccactgactgcaacctctgcctcccgggttcaagcgattctcctgcctcagcttcccaagtagctgggattacaggtgcctggcaccacgcctggctaatttcttgtatttttagtaaagacagggtttcagtatgttggccaggctggtctcaaactcctgacctcatgatccacccacctcggtctcccaaagtgctgagattacaggcgtgagccactgcgcccgacccaacttacatctttatgcagagtcttctgtttttacgtgtgaatgttaaatgttgcacaataataaaatgagctctgtggatatgaaatttagaataatatttctttcacatattgctataacaatatgaagaaatttctcactcttattttatataattttttctgtgagtgaagttcagtctacagtttttactgatagtcacctaactgtaggtatctccttggtcactggtaagtgactgattagtaatgccaatctatttcattttagtcactaagaaaacaatattttaaaattttcaatagaaaaaagtattattatattattgtttctgaaactttcagacactgtagaccattcaatcaataatgatgttgatgtagacaacaaattgtctatataattataagctcattttagcttttaatgtaaaaattcagtatattttataagcaaaattagcagctcttttaaatcactagagaaatattgttgttggaatccatttaccaaagtatttgtgttaggcttagtaatgagtactttaaaccaaaaatcaagttctacatactatctaagggttaaaaaaaaagtggtttttaagtttctatttatttctactatattataaaattcaaagccgaaatgttaggtcaggaatgaaagcaagaattggatatgacggtgctgggcacaatggttaagactgaaacttggtatcaggtggttcctgattgcattttgtctgccacttgtgggctgtatgacctgaatacattttcatgacctctctgtgcttgactcttcagttgcacagtgaggataatagtgcctaaattctagggttttgtaaaattaaggcaactaatgctgataatgatgccataggtacaccaaccacatagcaagtgtacagaaaatttattcacttttatttgttaattgttacatcataataaatgttaagcctgaaaaacaggtggccacatcagtgatttgcaacccatgtttattctttttttttttttgagacagagtctcactctgttgcccaggctggagtgcagtggcatgatctcagctcactgcaacctccgcttcctgggtttaagcaattctcctgcctcagcctcccaagtagctgggactacaggcacctgccaacacgactggctaattttcgcagttttagtatagaaggggtttcaccatcttggccaggctggtcttgaactccagaccttgtgatccatccacctcagcctcccaaagtgctgggatcacaggcatgagccaccacgcccagccacccatgtttatactaatcagccagtcttgggctataatggtagttagatttattttattttatttttgagacagagtctcgctgtgtcatcaggctggcgtgcaatggcactatcttggcttaccgcaacctccgcctctcgggttcaagcgattctcctgcctcagcctcctgagtagctgggattacaggtgcacgccaccacgcacggctaattttgtagttttagtagagatggggtttctccatgctggtcaggctggtctcaaactcccgacctcagttgatctgccctccttggcctcccaaagtgctgggataacaggcatgagccactgcacccggccagtagttgagtgcttttaatgctacccttggaaaattcccatatatttacatatatcacggatataaatattataaaaagatttctcattgagtattgctctttagcactccagtaacactagacaaataagcagttaaggccgggcatggtggctcacgcctgtaatcccagcactttgggaggcagaggagcgcagatcacgaggtcaagagatggagaccatcctggccaacatggtgaaaccccatctctactaaaaatacaaaaacttagccaggcgtggtggcacgcacctatagtcccagctacttgggaggctgaggcaggggaattgcttgaatctgagaggcggaggttgcagtgagtagagatcgcaccactgcactccagcctggtgacagagggagactctgtctcaaaaaataaaataagttaaataaataaataaacataagcacttaaatattgagcatttgctagttttaaaatgaaagtaggcaaattgtttccttacttatttaataaatttctaattgccaagtacctatgtttatttgaaaaattgaaatgtagtgtaaaaatatatttaaatacctttatttcctaacaaataaaagaaatcatttatttagagagaattttactctaaacaattgctttagagtgtgtcttttaaagtattatattattttgaacattaaaaataaagataatgggccaggtgcagtggttcacgcctataatcccagcactttgggaggccaaggtgggcaaatcacctgaggtcaggagttcaagactagcctggccagtgtggtgaaaccccatctctactaaaaatacaaaacattagccgggcgtggtggcacatgcctgtaatcctagctactcaggagtctaaggcaggagaatcgcttgaacccgggaggcaaaggttgcggtgagccgagatcgcgccattgcactccagcctgggcaatgagcaagactctgtttcaaaaaaataaataaataaataaataaaaataaagataatttattcctgactactgggttcagactattcataatactagaagttttctcatctacatcactcattcagtaagccatttcaaagaacaaaaatacttacgttttctgaaattttaagattgaaaaacactgttttctctggcctaatttctttttttttctcttttctttttcttttttttttttttttgagacacagttttgctcttgttgcccaggctggggtgcaatggctcaatctcactgcaacctctacctcccagcttcaagctattctcctgcctcagcttctcgagtagctgggattacaggcatgcaccaccacacccggctaattttgtatttttagtagagacagggtttctccatgttggtcaggctggtctcgaactcccagcctcaggtgatcctcccacctcggcctcccaaagtgctgggattacaggcgtgagccaccatgcccagcatctctggcctaatttcttaaaatttacttctcaatttttaaaaataatgtattaatagtatttttgattggcaaattatagtcgtatacattgatagtgtaaaatgtgatgttttattttatgtatacaatataaaatgattaagtcaagttaaataaaatatctaacaacttgcttacctatcattttttgtggtgagacatttgaaatttagttattttgaaatttacaacacatgattgtttactatagtcaccctgctgttcaatgtatgtcaaaacctatttaccctgtctatgtgaaactttgtaccctttgataaacaatctgtatttctttctttctttcttttttttttttttttgagatggagttttgctcttgttgcacaggctggagtgcaatggtacaatttcgactcactgcaacctctgcctcccgggttcaagcaattctcctgcctcagcctcccaagtagctgggattacaggcatgcaccaccacacccggcgaattttgtatttttagtagtgatggggtttctccatgttggtcaggctggtctcgaactcccgacctaaggtgatctgcccacctcagcctcccaaagtgctggggttacaggcatgagccgctgcgcccggccacagttctctatttctttcccaccaccctcaacctctgataactattattccactttttgcttttttgagttaaactttcttaggtttagtatataaataggccgggcatggtggctcatgcctataatcccagcactttgggaggccaaggcgggtggatcaggaggtcaggggtttgtagaccagcctgaccaacatggtgaaaccccgtctctactaaaaatacaaaaaaattagctgggcgtggtggcgggcgtctgtaatctcagctactcaggaggctgaggcaggagaattgcttgaacccgggaggcggaggttgcagtgagccgagatcacaccactgcactccagcctgggcgacagagcaagactctgtctccaaaacaaaacaaaaaaacaaacaaacaaaaatataaataaattatgcagtacttaacctatttgtgtctggcttattttatgtagcataatgccttctaaatttatctctattgattcaaatgatgagatttacccacttttaaggctgaatagtgttccattgtttatactacatttttagaagaattaatttaatatatatttatctgttggtggaaaaactcatgttatgaaataatatttctatgttaaagcatgttagtgtaattttcagcctataaatatcttattaaaagtagctaatttatacagagcactaattgtaacactatgcatgtgttactgaattcaattttcacagtaacttaataacataggtcttattattattctcattttacagaggaagaaacagagccactgagagaaaggacttggtcacactagcaaagccagtattaaaacacaaacagcggccgggagctgtggctcatgcctgtaatccagcactttgagaggccaaggtgggcgaatcacgaggacaggagttcgagaccagcctgaccaacatggtgaactcccatcactactaaaaatacaaaaattagctgggcatgatggcaggcacctgtagtcccagttactcaggaggctgagacaggagagttgctggaacccaggaggtgaaggttgcagtgagccgagatcatgccactgcactctagcctggtgacagagcaagactccgtcaaaaaaaaaaaaaaaaaaaaaaccacaggcagcttggtatccagagataaccctcttcagtacaacaataaaaactctcttcaagcagaaaagacataattatttttaacactcatttttaataaacattttacaaaaattaaataattggatgcatttttattgttctatgtgtgtattagtatataaaatggtacataaaaaaataagccagaaaacaatagttaatatttgcaataaatataactggaaagtagttaactatcatttgcagatgatatctttgtttactgagataataaaagcaactgaaagacttttaaaagtctattcagggccgggcgcggtggctcacgcctataatcccagcactttgggaggtggaagtgggtggatcacctgaggtcaagagtttgagaccagcctggccaacatggtgaaaccccgtctctactaaaaatatttttaaaaaaaccaattagccgggtgtggtagtgggcgcctgtaatcccagttactcaggaggctgaggcaggagaattgcttgaacccaggagatggagattgcagtgagccaacatggtcccactgcatgcactccagcctgggtgacagagtgagactccatctcaaaaaaaaaaaaaaatgtccattcaggtgggaacaaaaaattctaagattatcctcaagattatcagtttgttgtacacctgtaatctttcattttcttgcaaaaaaatgtgtgactgtggtgggaaatcacccatgaaattaggttactattgggtaaactaaatcagaggtgcttttatatattttattttttttattttactttatttatttatttagagacggagttttgctcttgttgcccaggctggagtacaatggtgtgatctcggctcaccgcaacctctgtctcccagattcaagcgattctcctgcctcagcctccctagtagctgggattacaggcaggtgccacccacacccaactaattttgtatttttagtagaggcagggtttctccatgctggtcaggctggtctcaaactcctgacctcaggtgatctgcccgcctcggcctcccaaagtgctgggattacaggcatgagccactgtgaccggccagaggtacttttaatagaaagagacacatcatagaaaaacactccttgacctggaagtaagtgacttccagctgggccatgttgtaatctgctcatagtggccacatggaaggaaatatatttgtatattgtcattgtatctgcctcctacatgttgcttcaagtagggagaacaggaggatcccatggaagaggaaaaaaaggaggtctcatttgtgtgagaaataatcacctctaatctggaatagcttatgataaatagaagagaccacaacatgaccacatcaatgagagaaaaaaggcaacctggttaaaagtgctcactggcatttttaggcagcatttagtaaggcttagtgaatgatcagcctctggaataccaacagtctaccagcaaggctgaactcattctggttaaatcagcattctagtggcccagttttacactattcattacagaaatactgtggagatgagtgggtaccctgctagaattggccttattatgaaaaagcatacctaattatttgttttcacaatttaaaaaccttgaaaatgaccaggcgcagtggctcatggctgtaatcccagcattttgggaggctgaggcaggtggatcaagaggtcaggagttcaaaaccagcctggccacgatggtgaaaccctgtctctactaaaactacaaaaattagccaggcacagtggcaggcacctgtaatcccagctactccagaggctgaggcaggagaattgcttgaacctgggaggcagaggttacagtgggccaagatcacatcactgcactccatcctgggtgacagagtgactccatctcaaaacaaacaaacaaacaaacaaaaaaccttgaaaacatcatgaatttattaaaaatgtacttctgctaattgtggagcattctacaatactgtaatataatattgaactttaagcaccttaatatgaatgtttcttgaatgcatgaagagttatgtagatggtttcttttaaattaacatgagagaagtaatagagaaaagatttgaagtggaataaataatctaaaacacatttttttcaaaggcttggcataattactatgctttttgaaatggccatattactaaccagaagcaaaaacaagatttttgtttttctcagtcagtatgtttttgatcttttgaaatttaaaatcctggctaaaggatttgattttagtaagtggcttactaaagtattcaaggcaatacaaggataatttttataggtaggaaaatgcatactatatacacacattgctcttccctgtttgctttttttttttttttgacatggagtcttgctgtgttcctgaggctggagtggagtggcgctgcaacctctgcctcctgggttcaagcaattttcttgcctcagcctcccgaatagctgggattacaggcacacaccaccatgcccggctaatttttgtatttttagtagagatggggtttcaccatattggccagggtggtctcaaactcctgatttgagaccgcatccagccctctgacttgctttaacattgaaagactgcagattgcaaatctagtctcttgatttagagtaaattaacaaaagacttatttttcagccaaataattgtataaaatcaatgggtagggtcgagcggtggctcatgcctgtaatcccagcactttggttggctgaggcgggtgaatcacgagatcaggagttcgagaccattctggccaacatggtgaaaccctgtctctactaaaaccacaaaaaattaactgggcgtgtggcagcatctgtaatcccagctactcgggaggctgaggcaggagaatcacttgaatccggaaagaggagtttgcagtgagccgtgatcatgccactgcactcactccagcccaggtgacagtgtgagactccatctcaaaaaaaaaaaaaagggtaacagatgcccagatgccattatcagccaaaaaaaataatatgactagatttagtaagtatccagccatgcaaataacagcccaattaaattaagaccctaataagtgcatgtggaaagcatacatgtgcagcatggtgcacatccactcagcacctgcttctgcctctttagagatataccaattttccctgagtgactcagagtgactactaggaactgagaattctgtgttcagagggattactggaaacatggttaatacacttttttaatattataataaaattttatgaatcttactctgcctcacagtcttttagtaaaaaattgtttatatatagtactcaatttggattcatggaaaatttcaatattccaggtaagtcagacacacttaaatgtcaaccaaatttcataaaacatattcgagtcagattcaaatatgtttactcatattacctgggaatcaaaactgagagaagaataacttatttgttaaagttagagatgtagggaagacccactacttttgaccaacatctcctccacccctaaccacaggcaattatcattctactcactgtttctatgaatttgattttttaatattctacacagaaatgagattatgtgatatatttttattctgtgctggcttattttacttagcacagtgtcctccaggttcatcaatgttgcaaataagacttccttctttttaagggctgaatagcattccattgtgtaaatataccacattgtctttatccattcatctgttgatggacacttaggttgattccataacttagctattgtgagtaatcacttcctactctttcatttgtttgtatatcttttctttccttcctttgttatttctagaagtattttaatattaaaatataaattacaactctcaaataacttcatttctatgcctcctattggttaatattttggctgactgaacaaataagattttttaaaattacttggaacaaggccattacttcgtatttaacataatttgagaaaaaacagtaatgaaaatcaacactgattagtgaaacaatgattatctagcccctggtaataattttctctcccattcatcataaaagctgtctttgtgtcatctctcctagttgtaagaaagaggcttctgatccaattggtcagcataaaatattgtaaaatttaactttttggtcccaaaattaagctgctttttaacagaaaagttgatttttatatgtattattttattgtattatatttaaattcttcagcaaaactaaacaacacatacatttaaaattctctgaaaattaaaaatgcttaagaaacatttttatagaaactaaatctaaaataattttagattcttagagaacatttctcaaatacttcaagttctcctgttctgacagtagctatatatttttccatattgctataatagagctttggctgttctttgtggctaaatccaccatttctattctattttgttgtgtagtatttacgttatgcattttacattttaaaagttgtagtccatgcaatgcaattttaaacaattgacaaacattttttcatgtaaaattctgtgcttattcagcagtcactttattttcactcttcaaaggcattctaactgcctgaaaagcaaagtgacagttcaagtgagtgtgctgagctggaatgttgcaggaagtcagggaccccaaacggagggaccagctgaagccatggaagaagaacgtggattgtgaagatttcatggacatttattagttccccaaattaatacttttataatttcttatgcctgtctttactgcaatctctaaacataaattgtgaagatttcatggacacttatcacttccccaatcaatacccttgtgatttcctatgcctgtctttactttaatctcttaatcctgtcatctcctaaaccaaggcggatgtatgtcgcctcaggaccctgtgataattgcattaactgaacaaactgtagagtatgtgtgtttgaacaatatgaaatctgggcacacaccttgaaaaaagaacaagataacagcaatgtttaggaaacaagagacataactttaaactctgacagccccagtgagccgggcggaacagagccgtaggagccgggtggaacagagccgtagttctcttctttcaaaagcaaatgggagaaacatcgctgaattctttttctcagcaaggaacatccctgggaaagggaatacacgcctgggggtgggtctctgaactggcccccttggcgtggccgtcttctatggtcgaggctgtaggggtgaaatagaccccagtctcccatagcactcccaggcttattaggaagaggaaattcctgcctaataaattttggtcagaccggttgctctcaaaaccctgtctcctgataagatgttatcaatgacaatggtgcccaaaacttcattagcaattttaatttcgcctcggtcctgtggtcctgtgatctctccctgtctccatttgccttgtgatattctattaccttcggaagtacttgatgtctgtgacccacacctattcgcacactccctccccttttgaaagtccctaatagaaacttgctggttttgcggcttgtggggcatcacggaacctaccgacctgtgatgtctcccccggatgcccagctttaaaatttctctcttttgtactctgtccctttatttctcaagccggctgtcgcttagggaaaattgaaacgaacctacgtgactatcggggcaggttccccgatactggaactctccagtgtcagtctattcacattcatacaggtgatcttctggtgagagtggacttcgacagcaatatcacagcaatgtggaacagatgtaataaaataaaagatgaaacactgcttttcaggaaaatgagctaatctttcttactctgtgtatgtgattatgtgatggttgtaagttttaaaataaagactaggccaggcgcagtggctcacacctgtaatcccaacactttgggaggctgcggtgggcagatcacgaggtcaggtgttcgagaccagcctggccaacatggcgaaaccccatctctattaaaaatacaaaaaaaaattaggtcatcgtggtgggcgcctgtagtcccagctacttgggaggctgaggcaggataatcgcttgaactggagaggtggaggttctctctgtcacccagggtgtagtgcagtggcataatctcaactctggggttcaagccttcgtctcccaggttcaagcgattctcttccctcagtctcccatgtagctggaactataggcacgtgccactatgcctggctaatttttgtattttcagtagagacagggtttcaccatgttggccaggctagcttcaaactcctgacctcaggttatccacctacccactttggcctcccaaaatactagcattacaggcgtgagacaccatgcctggccattgcgtgctttttttttttttttttttgaaatgtagtcttgctctgtcacccaggctggagtgcaatggcacaatctcggctcagtgcaacctccacctcccaggttcaagcaattctcctgcctcagcctctcaagtagctgggattacaggtgcccgccaccatgcctggctaattattgtattttttagtaaagatggctttcaccacgttggtcaggctggtctcgaactcctgacctcaggagatccacccgcctcagcctcccaaagtgctaggattacatgcgtgagccactgtgcccggcctaacatccctctttttaaacaaccagttattctctttagaacaaaaatttaccatacaagatcctttcttatatacaagctgtttgtctatgtaatcttttttgcatagctagggtgtgacatattaccaaacccaatatgaagtcttagcagactcagtgattatagactatcatccctgctataaagataataattaagcaatatactacagcaattgagattctttgtttgatactccactctggggggtgctacagtatataatcccactgcaaaaagtaaagtgagtataacaattccctgcccagggcagtggttcacgcctgtaatcccagcactttgggaggccgaggcaggcaaatcacctgaggtcaggagttcgagaccagtctgaccaacatggagaaacctcgtctctactaaaaatacaaaattagctaggcatggtggcgcatgcctgtaatcccagctacgcgggaggcaaaagcaagagaattgcttgaacctgggaggcagagtttgcagtgagctgagatcgtgccattgcactccagcctgagcaacaagagggaaactccatctcaaaaaacaaaaacaaaaacaaaaacaaaaaaaagacaattcgcacaagggtggtgtagtagataatttctatctaaaattttattcaccaatttatagaatttcccttttggggtctatgaagttacaaatgtaatcccataaataatcaaaatttccctgcaaatatgcaccaaaaagaagttataatagttgatggcaaatcttgagaggaaaggtaggaatgactgaaagtatttggtaaggtaagaatgggactgagtagaaggagtaggcctcacttatgtactcatcttttataatttttatatttcttcacattaatatctgggactttcctctaggctgttcagggttgctccctcagctttccaggtttaactgagtatgatgtatccaagagtcaattcctgtaactttcattgcaaacagggttcaaagaagaacagtgaaaggtccttcccagtttgcgcttagggagggagagagagagaggggagagctttcaccaatatcaaatctgggctaaatgaaggtgttcttattttctggggttgagactctgctaaatgtgttaattcctgctgaaagtgagcaagagaggttacatgcttaaccaattcagaggtttcctggtctaatagaaaccattgtaagaaaaggccattcatacagcatcttgaaagggctcagacctaactttgaaggggtatttcttacttgcagtaaagccatggaaagaaaagtaacccaagaaaggtgagttttttggggacagttttttttttttttttttttgagacagagtttcactcttgttgcccaggctggagtgccatggcatgatctcggctcactgcaacctccctctgcctcctgggttcaagcgattctcttgcctcagcctcccgagtagctgggattgcaggaatgtgccaccacacctggctaattttgtatttttagtagagacagggtttctccatgttggtcaggctggtctcgaactcccgacctcaggcgatctgcctgccttggcatcccaatgtgttgggattataggcgtgagccactgcgccctgcctgagactgggctatctctcaaggttatgctttccagccctcaggatggccacagtcagataggtattaggcccatccggcctaatacatgttttaacatagaaatatcttcccataatatacaagtttttcaaagaatagatgaatgtatttaaattaactttttaaaatgtagcatagattcacaatggaatactattcagcctttaaagacaagatgtcttttaacaatattatttgtcttctctacctttcctgagtactgggatctttaagcacaatggagataatactatattcctagtgcttttgagacccactgtgtgatggctgccttaaatgaggtgccattgtcactttggaggtacttaggtagacaaaagtcggtagtaatttcattaattaacacttttattaccgcagaggtcttttctgtatggcatggaaatgcttctacccaatttgtgaaagtattaattccaggaggtattgcatgccctctgtctttggcatgtgggtaaagtctatctgtcagtcttttcctggttagcttcccatcctttggatttgagaagaaagaagtggcctgttgagattatctttaagacagactttgcaagcattaacctgtttgactgtttttaatagactctttcctggccgggagcagtgggtcttgcctgtaatcccagcactttgggaggccaaggcaggctgatcacgaggtcaggcattcgagcccagcctcgccaacatggcaaaaccccgtctctactaaaaatacaaaacaaaaacaaaaacaacaaaaaccaaaaaactagccaggtgtggtggcgggcgcctgtagtcccagctacttgggaggctgaggcaggagaatcgcttgaacctgggaggcggaggttgcagtgagccgagatagtgccactgcactccagcctgggcgacagagtgagacttcatctcaaaaaaaaaaaaaaaaaggtatttcctgaaaacaatctctgaggacactgacaaattttattctttcccaagtaaaatgtttgatggattttaaagacttttccattggctggaggctggcaagtggaatttgccattctctgactgtggccatcctgagggctggaaagtgtacccttgagagatggtccattttatcttttcaggactactaaagcttaatttcttttatggagccttcatagattagaggggtttcaagtgtgttgatgcctggaggcttcattgtaactgactaggctgcctgattagctaacttgtttctttccactattttatctgttccctctgaaggggtgggttgcccctccacacctgtgggtgttacttggaaaagaaagagacacagagacaaagtatagagaaaaaaaagggggcccaggggaccagcgttcagcatacagaggatccacgccggcactggcctctgagttcccttagcatttattgatcattattgggcatttcccagagaggggcatgtggcaggataatagggtaatagtggagagaaggtcagaaggtaaacacgtgaacaaatgtctctgcatcataaacaaggtaaagaaaaaagtgctgtgcttgtgatgtgcatatacataaacatctcaatgccttaaagagcagtattgctgccagcatgtcccacctccagccctaaggcggttttcccctatctcagtagatggaatatacaatcggctttacaccgagacattccattgcccaggaacgagcaggagacagaagccttcctcttatctcaactgcaaagaggcgttccttcctcttttactaatcctcctcagcacagaccctttacgggtgtcgggctgggggacggtcaggtctttcccttcccacgaggccatatttcagactgtcacatggggagaaaccttggacaatacctggctttcctaggcagaagtccctgcagccttccgcagtgttttgtgtctctgggtacttagggagtggttgagattagggagtggtgatgactcttaacaagcatgctgccttcaagcatttgtttaacgaaacacaacctgcacagcccttaatccatttaaccctgagttgacacagcacatgtttcagggagcacagggttgggggtagggttacagattaacagcatatcaaggcagaagaatttttcttagttacagaacaaaatggagtcttagcctatgtctacttctttctacacagacacagtaacaatctgatctctccttcttttccccacaccttctgatgtctcttacattgctatttcttatggaagaaaaactgagaaaaataacctgttaattttatgattgtctccattttccattggctttttgcactcctaatattggagtggtgcaggggctgttacagggtttgaggaggccctgcattttcagattaataatggcttctagtcctttcctagcctctggctttagcggatattgttgctggttaggaaaaaaggtgggatccttaagatgggtctggactggcctagtagttatagtttggcatatttttccttgaagtgcccatacttttggattaacattagcttccaccagggaaagacaaagagtttgttccagggcttattataaagatgctgaccccatgttaactaaaatttctctacctaaagagtgggactttctggaatgattaacacacttgaataaacctttcggtttttgttttgttttgttttgttttttctgagactgtcttgctctgtcacccaggctggagtgcagtggcatgatcttggctcactgcaacctccatctcctgggttaaagcgattctactccctcagcctcttaagtagctgagattacaggcacccattaccatgcccacctaatttttgtattttcagtagagacagggtttcactatgttggctaggctggtcttgaacttgcgacctcagttgatctccccacctcagcctcccaaagttctgggattacaggcataaaacaccatgcccggatagaataaaattttaaaatagtctttttgttgctgttgttatctaagtaaacaaagatatcacctgcaaatcataattagctactttataattgtacttattacaaatattaactaacttatcttttttcggcttaaattttttatgtaccattttatacattcacacacatataaaagtgaaaacatattcaatattcaattttttgttaatctttagtaaaaatgagtgttaaaaatattttttttttgaaggatttttattgttgtactcaagaatgttatctctggaggcaacattgcctgtattttaatattaactctgctattgtgagcaagtaatttctctctgtgcctctatttcttcctctgtaaaatgagaataataatacctatgttattaagttactgtgagaattaaattcattcacatatagtgttatagttagtgctcagtaaagattagttattaataaaatatgtacatgctgaattaaattaagacttccttttttgagatggagtttcactctttttgcccaggcaaatggagtgcaatggcacaatctcagcacactgcaacctccgcctctggagtcaaccgattctactgcctcatcctcctgagtagctgggattacaggtgcccaccaccatgcccggctaattttgtatttttagtaaagacagagctttaccatgttggccaggctggtctcgaactcctgacctcaggtgatctgcctgccttggcctcccaaagtgctggatttacaggtgtgagccactgcgcctggcctaatacatgttttaacaaagaaatatcttcccataacacacgagtttttcaaagagtagatgaatatatttaaattaactttttaaaatgtagcatagattcacaatggaatgctattcagcttttaaaaagggtaaattccaacatttagacaaataaagacaaatactgcatgatctcatttatatatagaacaaaatttaactcaaaagagtagaaagtggattaatggttaccagaggctatgggtagtgaaaaggaaataaaaagttgtggatcaaaaagtacaaagtttctaatagacagggtaaataggttttgagatctgttgcacagcagcatgatcatagtaaacaataatgcattgtatatttcaaaataactaagagtaaatttcaaatgtctcaccacaaaaaatgatatgtaagcaagttgatagatatgttatttaacttaatcactccatctatttatctatctatctatctatctatctatctatctatctatctattcctttttgtggagaacagggtctcgctatatttcccaggcaggtctcgaactcctgggctcaagctatcctcctgcttctgcctccctgagagctgggattacaggcgtgagccaccatgcctcgcaatcactccatattatatacatatattcaaacatcacatttaccctataaatgcatagaactctgatttgccaataaaaaatactattaggctgggtgccgtggctcatgcctgtaaccctagcactttggaaggctgaggcgggtggatcacctgaggttgggagttcaagaccagcctgactaacatggtgaaaccccatctctactaaaaatacaaaattagctgggtgtggtggcgcatgcctgtaatcccaactactcgggaggctgaggcaggagaatcgcttgaacctgagaggcagaggttgctgtgagccaagattgcgccattgcactccagcttggcgacagagtgagactccatctcaaaaaaaaaaaaaaacaaaaacaaaaaacaaaaacaaactattaatccatttttactaaaaaaaagaaactttaaaaaattgggctagataataaagtgtcttatcttaaatttccagaaaatatatacacgtattttttatttcagatagcttgcacatttagtgatgtaggtaagtaaacttttaatatcatgaatagtctgaaccccacactcaggataaaatattttgattatttttttctttttttgagatggagttttgctcttgttgcccaggctgaagtgcaatggcacgatcttggctcactgcaacctctgcctcccaggttcaaacgattgtcctgcctcagcctcccaagtagctgggattacaggaatgtgccaccatgcccggctaattttgtatttttagtagagatgggttttctccatgttggtcaggctggtcttgaactcccgacctcaggtgatctgcccccctcggcctcccaaagtgctaggattacaggcgtgagccactgtgcccagctggtttttcatgttcaaaataatatagtactttaaaagacagactctaaagcaactgtttggagtctctaaattgtctctaaatatttaatgatttctttcacttgttaaaggaaaacattatttaaattttttttttttttttttttgagatggagtcttgctctgtcacccaggctggagtgcagtggcgcaatctcggctcactgcaagctctgcctcccgggttcacgccattctcctgcctcagcctccctagtagctgggactacaggtgcccgccaccacacccggctaattttttgtatttttagtagaggcggggtttcaccatgttagctaggatggtctcgatctcccgaccttgtgatccacccgcttcggcctcccaaaatgctgggattacaggcgtgagccaccgcatccggccattaaatatgtacttttaaactacatttaaatttatcaaatgaacataaataattacttggtaataagaaatttattaaacaagtagatgaggaaataatttgcctccttttctaattttataactgacaaactctccgtatttaagtgcttacttatctagagttactggagtgctaaagagaagtactcaatgagaaatctttccataatattcatatccatgctgtatgtgaatatatgggaatttgccaaggataatattaaaaacattcaagcctcagactgatgaggatgaacatgggttacaaaccactgatatggccagtttgttttcaggcttaacattgatcatgatctaacagaataaaaaaataagagttaataaatttcctgtatacttactatgtgctgggcattgtttggccacctttatttgtatcaattgctttaattttaccaaaaccctaggagttatgcagtattatcctcactccacagctgaagagtcaagcacagagaagtcaaaacagtccataagtggcagaactggaatgcaattaggaaccacctgataccgagtttcaactttaaccattatactcaacactcttttacccaatgcttgtttccattcctgacataacattttggctttgaaatttctaatttagtaaaaacaaagaagaatttaaaaatcactcttttttaccgttagatagtatgtagaacttgatgttttgtttaaaccacctattactaagcctaaaccaaatactttggtaaatgggttctaacagtgatatacttctcacgacttaaaattgccactaattttacttttgaaatatattagattttatattagaagctaggatgagcctattatgatacagaaaatttgtggtctgcaggaacatcatcattcattgcatggtctacagtttccgaaaatttcagaaacactaacataagaatacttttctgattgaataatttaaggatattaagtcttctcagtgactaaaatgaaatagagttactaatcagacacaatgtggttttaagtgttatttaatgaacacatgtaaagtttcttttaaacacatgttaacaacttatttctattgatttttcacttctattataaaaaatattaaaatgtctgtgactacaaacgtataaaattcattcaaatctaaacagtgctaatcttaaaagttctgtatacttagaattatagaaagcctattctctatttatacttagaagataaaaaaattgcttttcagcaaacccagtggagcaatcataagctcactatcataaggtattataatattaatacaatcatctagagaaaacttttaggtatctggatgttcaagttgtttaacttatatgattcagaaactatgatttatttatttatttaggagatggagtctcactgtgtcgcccaggcaggagtgcaatggcacaatctcggcttactacaaactctgcctcctgggttcaagtggttctcctgcctcagcctcccatggtctcaaactcttgacctcaggtgattcaaccaccttggcctcccaaattgctgggagtacaaaagtaagccaccatgcccagcccagaaagtatacatttttattaagtataaaaaattaaaatatgtcaatttctttttctcagtctctaaatactgtcattatttctagttgacataacaagagaatttaaatgctgtggctgtagaaactagaaatgtgggctgggcgtggtggctcatacctgtaatcccagcactttgggaggctgaggtgggtggatcacctgaggtcaggagttcgagaccagcctggccaatgtggtgaaaccccgtctctactaaagatacaaaaattagccgggtgtggtggcaggcacctgtaatcccagctactcggaaggctgaggcagaacacatgtgtttaaaagctactcggaagcttccctgaggcttgaacccgggaagcagaggttgcagtgagtcgagaatgcgccattgcactccaacctgtgggacaagagtgagacttcgtctcaaaaaaaaaaagaaactagaaatgtgatggttgactctggtttactttctgcctttttattttatagaaacaaagcagcataaggaagggcagaaataatacatcttgattgcaaacacaccagtgcccgtctagagagaatatatttctgagcatattaatttgaaattcacggcatcttttgtagaagtacagactagtatatgacaaacaataaacacaaataaaaatttaagactgcaatagaattagaaaagtattctaaaaataaattctgatcaattattttttttccaccagaatagttgtgatgaaatggttgtggcagtgtgatcttaagtaaccaacactctcatcattcttgggctatggacattagactttgatgccttttttctttataaaaatattttcttttcataagtcaggaatttaacctgatctgcacacccactcattttcaaaaatagtttattctaaaaaagaaatgcggtttcttttttttcttttttttttgagacagagtcttactctgtcacccaggctggagtgcagtggcacgatcttggttcactgcaacctccacctcccaggttcaagcaattcttctgcctcagcctcctgagaagtgtgcaccaccacacctggctaattttgtatttttagtagagctggggtttcaccatgttggccaggctgctcttgaactcctgaccacaagtgatccacccacctcggcctcccaaagtgctgggattataggcatgagccaccacacccagcctcagaaatgcggttttaaaaccacatttttttctaaaaacagtacagtaacaaattaactcgatagtctagtgtacagttaattaattaaaaataaagatgtggagtcatttattttaaccacacagttaagaataaaacatttttcgggctaaaagctttcagagatgttagcttataggatgtggggagacctggcatagaaacattcactcttatgcccaaagggaaaataattctgtgtctttcaacccaatgctaactatgaaccaagaattggaaaaatgtaacatgtcattataccacaaggcattttattatttttattatagattcaggtgtacatgtacagatttgtagcataggtatactgcatgttgttgaggtttggacacttaataatcccattgtccaagtagtttacagtattacctaatgagtaatgagtaatttttctgttggttttttttttttttttctttcctgagatggagtcttgctctgttgcccaggctggagtgaagtggcatgatcttggcttactgcaacctctgcctcccgggtacaagtgattctcctgccgcagcctcccaagtagctgggattacaggcacctgccatcatgcctgtctaatttttgtatttttagtagagacagggttttgccatgttggccaagctggtctcaaactcctgatctcaagtgatccgcctgccttggactcccaaagtgctgggattacaggtgcgagccactgcacatggcccactttttgactttttttttttttctttttgagacagagtattgctctgttgcccaggctggagggcaatggcctgatctcggctcactgcaacctccacctcccgggttcaagcgattctcctgcctcagcctcccgagtagctgggactacaggcatgtgccaccacgcccggctaattttctgtacttttagcagagacagggtttcactgtgttagccagactggtctcggtcttttgacctcgtgatctgcccacctcagccttccaaagtgctgggattacaggtgtgagccaccatgcccagccactttttactttttaataagagccattctaactggcgtgagatggtatcacattgccattttgatttgtatctctattgatttgggatgttgaacaattttttgcatgtttattggctgcttttatgtcttcctttgagaagtgtctattcatatcatttgcgtttttcttattaaattcctgatagattctatatattaacgctttgttgcatgcagtttgcaaacattttatactgtaggttgttttttttactttgtcaatagtttcttttacagtgcagctctgcagttgaattaggtgctaatttttatttttgttgtattcacttctaaggtgttagttataaatgctttctggaggccagtgtctagaagagtactttctaagtgctctaggatttttatagcttgaagtttcactgttaagtctttaatctatcttgagctatttggttttttatatatagtgagaggtaggggtctagttttcttcttctgcgtaagactaaccaattttcccagtgccatttattgcactgggagttattttctctttgttaatttctgttgactttgtcaaaaataagttgcttgtagaagtgtagctttgtttcagggctctctcttctgttcaattggtcattatgtatacttttgtaccagaaccatgttatattggctactgtagcttatagtatagtttaaagtcaggtaatatgaggcatccaagttgattcactttcacattgccttgggtttttggctttttaatttcttatatgaattttagaagattttatctgaattctatgaaaaatggcattgatagtttgatagaaacagcacttaatctgtaggttgcttcaaacagcatggacatttaattatattgattcttccaatccattagcataaaatgcttttttatttatttgtgtttaattttcttcagcactgttttgtaattttctttgtagagatattttatctacttgatttaatgtattcttaggtatattatttgtttgtggctattgtaaacagaactgtgttcttgattttgtcctcagcttgaatgttattggtgtacagaaatgctactcatatgtgtatgttggttttgtatggtcagactttgctgaagtcattttttagtcttaggggtgttttagtgaaatctataaagttttccaggtagagaattatttcacctgtgaagataatttgacttccttttttttcctatttggatgacttttatttcttgatcttgttgaattgctctggctaggacttttagaactatgttgaataggagtatttagggtgcatatttttttcttatttttattcttatggagaatgcatccagattttgcccattcagtatgattttggctgaagatttgtcatagatgactcttattatttggaggtatgtttcttctatgcctagtttattgatttttttttttttttgagatggagtcttactctgtcgcccaggctggagtgcagtggcgtgatctcggctcactgcaacctccgcctcccaggttcaagtgattctcctgcctcagcctccctagtagctgggactacaggtgcccaccaccatgcctggctaatttttgtatttttagtagagacagggtttcaccttattggccaggctggtctcgaactcctgaccttgtgatcagcccacctcggcctcccaaagtgctgggattacaggcgtgtgagccaccatgcccggtctttttttttttttttttgagacggggtctcgcagtcaccaggctggagtgcagtggctcactgcaacttcaacctcccaggttcaagcgagtctcctgcctcagcctcccaagtagctgagactgcaggcatccaccaccacgcccagctaattttggtattttttgtagagaaggcgtttcaccatgttggccaggatggtctcgatctcttgacctcatgatccacccgcctcggcctcccaaagcgttgggattacaggcgtgagccactgcactcagccttgttgataatatttttatgaatactggattttcttgaatgctttttctgcacttgtgataattatgattttttgcttatatatttttacaaggtgaatcacacttattgacttgtatatgaacatttttgcattcataaaataaagctcacatgatagtggcaaaataactttttgatttgcttatgaactcagcttgctagtttttttttttttttttttttgagatggagtctccctctgtcgcccaggctggagtgcagtggtgtgatctcggctcactgcaagctccgcctcctgggttcacgccattctcctgcctcagcctcctgagtagctgggactaacagtgccccccaccacgcccaactaatttttttgtatttttttagtagagacggggtttcactgtgttagccatgatggtctggatctcccggcctcgtgatccgcccgcctcggcctcccaaagtgctggaattataggggtgagccaccgtgccctgcccctcagtttgctagtattttgtggaggatttttgttttaatgttcatcaggaatattgacctatagtttttttgttgttgttctgtcttcactaaatcgtggtaacaagatgacaatggtgtttttttttttgtttttgtttgtttgtttttgagacagagtttcactcttgttgcccaggctggagtgcaatggtgcgaattcagctcactgcaacctctgcctcccaggttcaagcgattctcctgcctcagcctcccgagtagctgggattacaagcatgtgcccccacgcccggctaattttgtattttcagtagagatggggtttcttcatgttggtcaggctggtctcaaactcccgacctcaggtgatctgcccgcctcagcctcccaaagtgctggaattacaagcgggccaccaggcctggctgacaatggttttatataagttagggaggaatcacaccttgatttttttgaatacattcagtaggattagtaccagctcatctttttgcaatatatgttgtaaaactcagctgagaattcatctgatttagggctatttcggttgataagttttttattactaattcaattttattatacattttagacatttctgttttgttcaagatttttgtttctttctggttaaatcttgggtcatgtgaatccagtagtttatttattttctctgaagtttctagtttgcaagcgtagaggtgttcatagacgtatctgaggatgtttgtatttctgtggtattaattgtggttttacaactgtaacgtttaaattgatgctggataaaagttctagaaaagtcacagtccctcacaataaatctctgaaaagcataagtataaaaaaatgcactgcaagccaataaatgccacatataacttaaaaaaattcacagctaataacatactatatgaggtaatgttgtaagcttttactctaagagctagaataatacaaaaatgcccactttctccagtcttactaaacatagtactaaatgtccaagacaaacaaattagagaataaatcaaagtgtattattctgttctcttgcagctaataaaaacatacgccaaactggaaaatttataaaggaaagaggtttaaagaactcacaattcaacatggctggggatggcctcacaatcattatggaaggtgaaggaggagaaaagtcatgtcttacatggtgataatggagagcatgtgcaagtaaattgccctttataagaccatcagatctcatgaggcttattcactatcatgagaatagcatgggaaaacccactgccatgattcaattaccttccactgggtcttttctatgacctgtggggagtatgggagctacaattcaagatgagatttgggtggagacacagccaaataccataaaggcatccagatggaaaagaaaaagtgaaattattcctgtttgcagatgacataattttaggtatagaaaagcctaagaatttactaagaactactagaactaataaatttgttaaacttgcagaataaaaaaatcaatgtacaaaagtcaatagcagttttatacactaacaattatctcaaattgaaatgaaaaaagaaattccatctacaatagctgtagttaactatactttgaaataaatttagccaaaaagtttcaacaccttacaatctaaaaaacatttaagtaaaaaactaagtaatacacaaataaaaatacattactcattcatgaattggcatatatatatacatgtatatatatgtgtgtgtatatacgtgtgtgtatgtgtgtgtgtatctatatatagatgtatttgagacggtgtagcgctctgtcacccaggctggagtgcaatggcatgatctcggctcactgcaacctctgcctcctgggttcaagagattctcctgcatcagcctcctgaatagctgggattacaagtgtgcaccaccacgcctggctaacttttgtatttttagtagcgatggggtttcaccatattggccaggctggtctcaaacacctgacctcgtgatctgcccccctcagcctcccaaagtgctcagatgacaggcgtgagccaccgtgcccggccagcattaatatttttaaacagctgtattacacaaaatgatctacagatataatgcaacctctatcaaaatgccagttgttgggagcaagccccccaaagtctagccataaactggccccaaaactggccataaataaaatctctgcagcaatgtaacgtgtccataatggctgtaacgcccaagctggaaggttgtgggtttatgggaatgagggcaaggaacacctggcctgcccagggtagaaaaccgcttaaaggcattcttaagacacaaacagaagcctgagccatctgtcttaagggagtgttcctgctgcagttaactagcccaacctattcaattaattcgtcctatcccttcgtttcccataagagatacttttggttaatttaatatctatagaaacaatgctaatgactggtttgctgttaataaatatgtgggtaaatctctgttcagggctctcagctctgaaggctgggagacccgattcctcacttcacacctctgtatttgtgtgtgtgtgtctttaattcctctagcgccgctgggttagggtctccccaaccgagctggtctcagtagccagtgaaatacttaatataaattttgtaaaatatatgtaaaattcatatggtaccacaaaagacccagaatagccaaaggaataaaaaagtaaaaaaggctgaaagtatcaccctacctgactttgcaacatactgaaaaactatagtaaccaaaacagtgtggtacttcaataaaactggatacatagggcaatgtagctgaggagtgtggaaatatatccatgtatttacagctaattgatattagatataggtgacattttcttagagaaaggacagtatcttcaataaatggtattgagaaaactttcttttttcctttccttttttttttttttcttgagagggagttttgctcttgttgcccaggctggagtccatggcacgctctcagttcactgcaacctctgcctccacattgttcaagcttgcctcagcctcccgagtagctgggattacaggcatgcaccaccatgcccgactaatttttgtattattagtagagatgggatttctccatgttgatcaggctggtctcaaacttccaacctcaggtgatttgcctgcctcagcctcccagtgttgggattacagatgtgagccaacgcgtccactgagaaaactttctagccacatgcagagcaataaaatgagaccctcatctgataccatatataaaaattaactcaaaataaattagatattacaatgtaaggtctgacactctgaaaccactacaaaaaaaaacagagtgaaagacccataacattagtttgggcagtgacttttttgatataacttcaaaatcccagggaaccaaaagaaaaatagattaatcagattacttcaaataaaaaaattgctgcaaagaatctgagacaatcaacaggatcagacaactaaaaaatggaaaaaatgtgcaaatcatacatgtgacaacgtgttaatatcaaaaatatataagaatctcaaattacaatacaaaaagtactattaaaaatgagcaaaaggcttattttcaagaatagacatacatagtcaaaagatatatttaaaaatgctcaatatcaattattatcagggaaaggaaagcaaaaaaataaaaaaagatgagatatcaactcactcctgttagaatgactctgattaaaaagaaaaagaaaatgagtattagtaaaggtgtgaagaaaatagaatgcttgcacactgttggtttgaatgtaaatgagggcagccattatgaaaaacaaaataaagatttctttaaaaatttaaaatcaggccaggtgcggtggctcacgcctgtaatcccaggactttgggaggccgaggctggtggatcacgaggtcaggagttcgagaccatcctggctaacacagtgaaaccttgtctctactaaaaatacaaaaaattagttgagtgtggtggtgggttcctgtagtcccagctgctcaggaggctgaggcaggagaatggcatgaacccgggaggcggaggttgcagtgagccgagatcgtgccactgcactccagcctgggcaacagagcaagactctgtttcaaaaaaataaaaataaaaaaaaaattaaaaaaataaaaatttaaaatcaaactatcatataatatagcaatttcaataatggatacatatctcaaaataattaaatcagaatgaagaaatatttgcagaaataatctgcaagaaatatttgcagaatgaagaaatatttgtaacattcttcacaattgccaaaatacagaattaacacttcaacatctaatgagtacataaagacaacgtggtatatatacacaatggaatactattcatctttaaaataaaaaaatttattattttcaattacatagattaaccaaattatttcacttacatgattctagaaaaattaatctaactgaagtggagaataaaatggtgaccaccagatgccaacatatttggaaaaaagaggggtttagaaagatgtcagtcaaatacataattacagttgaataggagaaataagttcaaaaaagcttttgtactgcatggtgcctatagttcataacaatgtatttgtatttctgaaaaatgctaaaacattgtcatgtgctcttaccacaaaaatgttaactatgttaggtaaagcattaattacctagaatgaagcatttgacaatgtgtatatacttcaaaatgtcatgcttcacagaataaatgcacaatttatatattacagacggtatgaaagacactaaaagggcagctgtttcttatggtctcatgactggccactctgtgaacacagtaaacaagtttgcacgcaaaataatagaaaatgtttttatctaaaagctgccatgatcttcgaatgttttccagagaatatgaccaagaagttggctagagttaggtgactaaatgtaaaaactgtagactgaacttcacccactaaaaaaacatataaaactgagaaaatttcttcaaattgtaatatgaatatggaaaagaaatattactccaggtttcaaaatcacagaggtcattttactattttgcaatgtttaatgttcacacttacaaatagaagattttgcatggaaacgtacattgtggcataagtatactgtagaaaattaaattaaaagtttaatttctaagatatattttcaagcaaattttatatttgccacactttgtgtaagaatttaataagattattctttaacaaacagagaaaaacaacgctaaatgatttaatcctttcatctgtggacactgtatgctttttgttttaatttaactgatcagaaaattatattgatatgcaaaatctccagttaaaaccaatcttgcagtgcattaaaaataccgatttctcatcaaaacctacaatataccatgtgaaatgacatggtgtgaagagaacagtgagaaaactgtagccacagcacagcaaaaaggagggctgtgatgcatacacagctgaaatacacataataagacaaacaaaactaagacaattaggaaataaaagaagcacaattttttaattcagcaaaactgagctttgcagcctgaaaataaatgtcctctccacataaaaaatcaatgttatttctcacaattgatatgttccatctctgtcttgaagttacaaactaactccaacaggaatatttatggcttattataaagcatctgtgacacagaaagcactgtcatgtttgtttgctatatttatatataaaaacatcctcatgatttaggaagcccccctagtactcacctaaataaatgggctcaatcaatatttacttattttcattataaaaactgaaaggaacaaaaactaaaaaaagtaggcttatacagcgttctccaattaaaagaacaaaataaaatattctaacaacataaaatataacaatacactaattttgaaattaaatctaaattttttgcactaattttataaaaattatttttataatctctgaccagctcacatagcatcttatataaaataagagaaaaaaatgtaagacacaagaaaattatgggtctagcctaagaatcaggcaagtaaaaacaaaaatttgcatagggagattctgaattataagccatacaattttacagtaatcaattcaatacaaagcagagagtatggatttgttttcagcatttttaagtttttttagttttgcagtcatcatctaattaaaataatttgatttgtttcaatattgctcttctgaaactaggtagaaactcatactcgcaaagaaggcatttatttactccataatttttttaaacccaagctttatctttaaagtaatatatgtatatatttaactctgtgtaaatcaaaactaatagtctgtatgtgcttgcaggcagagaggcaacatgtttgaagaaaaatatataacaattttttaatgttaattcaggtctcagaaatgtatgcattttgtttatattgttttcttatgaccataaaagagaccctgtagccaacaacaatttaatgtacatttgaaaacaactaaaagtggctgggtgtggtggctcccacctgtaatcccagcactttgggaggccgagggggctaatcatggggtcaggagttcaagacaaacctggccaacgtagtgaaactgtttctactaaaaatacaaaaattagctgagtgtggtggcatgcgcctgtagtcccaactactcaggaggctgaggcggaagaatcacttgaacccagtaggcggaggttgcagtgagctgagaccacgccaatgcacccaggcgtgcacagcctgggtgacatagtgagactcgtctcaaaaaaaaaccgaaaagtgcagaattagtttataatacaaacaaatacaaacaataaatgctgcaggtaatgaatatttcatttacccatatgtaattattacatattatatacctgtatcaaaatatgccatatatgccatatttacacatactatgtacccacaaaaattaagaaaaataagtttaaataagaaaaaatgagtaataattcaacctacaggaataatattctctgacttatttgcaatttaaagccactggcaaaacagattactagaaatgttagtccattatcttattaaatagtgtatagttaccatcatttacctatacccttgagtaagatgggataagttaaatttaatggcataataatgcttcattgaatgcacgatggtcttaacatgttttttaaaaagcctgattaataagttcacacattatctaaaaattttaaaatgtactacattttattacataaaagtacaattggccaggcatggtgactcgcgcctgtaatcccagcactttgggaggccgaggtgggtggatcacccgaggtcgggagtttgagaccagcctgaccaacatagagaaaccccatctctattaaaaatacaaaattagccgggcatggtggcacatgcctgtaatcccagctactcgggaggctgaggcaggagaatcccttgaacctgggaggtggaggttttggtgagccaagatcacaccattgcactccagcctgggcaacaagagcaaaactctgtctcaaaaaaaaaaaaagtacaattagtaaaatgatataccagaaaattttttttctcaatataacacaggatatttatctgaactcctacctcatgcatcagtcaatattataaattaaccagaaagagcctctccacttacattttcatcttgcatcttacattttaatgtccttaactctttcactaaaaaaggtcgtaaataatgcacacctaataacaaagaatctctcatctttgatgcagcaacaattaagtcacatgctttcacatgtgaatacaataggaatgaagagcataacttgagttaaatgacattattcacttttcataaaacctaatttttttcaaaggatagtttgaatgtagttacaactctgcaaaaattttctacttcttataatgttatatacaaataattcatttaccaactttagttttagattcttttctatactcagcaatctgatttagtgtaatgcctgaagtgtcagtgccttaactatttctactgtgaattatctgatatttacatagaattttggattaaatattttttcatatttactgcatctgcaaaaatagattttagtatgaaccctctagtgttttctaagctgtcgtttttgaaaaaatgttttcccaaatttattacatttgcagggtttttctccaatataaatttccttatgttgcacaaagtttaagcaactgctccatggttttcctctagcacaaaatgtgtacaatgagatctgtgatacaagtaaaggtaccacaaccctccttatgttcataatgtgtgtcttcaaaatgaatactcttcactttagaggcttatattttctgaaagatttttgacagtaattgcatgtataatgcttttattaagtatgaaatctctgatgttgagtaagatgtgaacagatattaatggctttttcacattctgtatatttgaaatttttttctagtacaaatgctttcctgtgcaataaggtgtgagcattggttaaaagttttgccacattcttcacacttgtaggtttttttttagtatgaattatcttatgcacaatcaagtgtgacaacttttaaaggttttgttacattcttcacatttctaagatttctcaccagcataatttcttttatgtttagaaaactttgaagtgttttcaaaatcactgttacatcttttaggtttgtagagtttctcaccagtatgaattttcttatgtccagtaaggtttgaggactggttaaaagctttgccacatttttcacattggtagggtttctctccagtatgaattctcttatgtctagtaaggtgtgaggactggttaaaggctttaccacattcttcacattggtagggtttctctccagtatgaattaccttatgtgtagcaagatgtgaggaatggttaaaggctttgccacattcttcacatgtgtagggtttctctccagtatgaattttcttatgttcagtaagttttgaggatcgatagaaagctttgccacattcttcacatttgtaggatttctctccagtatgaattctcttatgtgtagtaaggattgaggactggttaaaagctttgccacattcttcacatttgtagggtttctctccagtatgaattcttttatgtgtagtaaggtttgagaactggttaaaggctttcccacattcttcacatttgtatggtttctcttcagtatgaatattcttatgttcagtaaggtttgaggattggttagaagctttgccacatttttcacactggtagggtttttctccagtatgaatgctcttatgtctagtaaggtgtgaggacttgttaaaagctttgccacattcttcacatttgtagggtttctctccagtatgaattatcttatgtgtagtaaggtgtgaggactgcctaaaggctttgccacattcttcacatctgtagggcttctctccagtatgaattatcttatgtctggtaaggtgtgaggactggttaaaggctttgccacattcttcacatttgtagggtttctctccagtatgaattatcttatgtctggtaaggtgtgaggactggttgaaagctttgccacattccttatattcattgagtttctctctggtatgaattatcttatgtgtagtaagggttaaggactgattaaaggctttgtcacattcttcacgtttgtagggattctctccagtatgaattattgtatgtgttgtaatgtgtgacgacaggttaaaggctttgctacattcttcacgtttgtagagtttgtctctagtataaattatcttatgtgtagtaaggtttgtgaactggttacaggctttgccacattcttcacatatgtacgatttctctccaatatgaattcttttatgtttagtaaagattgaggatccattaaaggcttttccacagtcttcacatttgtagaaatttactctagtacaaattattttatgttgagttaggtttgaaaatatgcaaaatgatttgccaaattctttatatttaaaaggtttttttctggtgtgtcttaccttatgtccatttaaatttgaaaatttatgaaagattttcatatatttatcacattgaaatattttgctctgggtagttggcaaacattggttaagtccattataacctcctttttgcactttgcactcatccacacttttacttaactgtaaattctcatgttcacattttccatatcttcttggtgtcactttttggaaagaatcttttatgttctgctctggtgaaaagtcttgggcaaaatgagaacaaataactgaaagaaataaaaataacaaatgactccacttgataagactctaaatatactttacaaatccaacctatacaattatacaaattacataagcaagatggtatagcaaaataccaaaggccctaattttttttttttttttttcctgagacggagtttcaatctgtcacttgggctggactgcggtagtgtgatctcagctcactgcaactgctacctcccaggttcaagcaactctcctgcctcaggctcctgagtagctaggattacaggcatgtgccaccatgcccagctaatatttgtatttttagtagaaacggggtttcaccatattggccaggctggtctcaaattcctgacctcgtgatctgcccacctcagcctcccaaaatgctgggattacaggcatgagccaccgtgctcggcccaaaggccctaatttcttaatagaaatataaatgtaacaaaaacatattgaccaaaatacatttgtggaaaatttataaattagttaagtgtgtgcaatgacccaggtgagcagaatgcaaagagccacatagaaagaaaataaaagcctgttacatttacccaacatagatctttctgctccccaatataacataatgcctttaaaagtaaattgccaacttcaattgttttgcatacagcagcacacctgagagtggataatttataaagaaaaaaggttggcagggtgcggtggctcatgcctgtaatcacagcactttgggaggccaaggcaggcaaatcaactgaggtcaggagtttgagaccagcctggccaacatggtgaaaccctgtctctacttaaaatacaaaattagccaggcatggtggtgcatgcctgtaatcccagctactcgggaggctgaggcaggagaatcacttgaatctgggagacggaggttgcagtgagccaagattgtgccactgcagtccagcctaggtgacagagtgagactatgtctcaaaaacaaaaaaaaaaaaagaaaaaggagaaagtttatttggtacacagtttggcagactgtacaagaagtgcatgccagcatcgacttctggtgagggtctcacaaagcttacaatcatggtgaaacacaaagagtaattatgtgagtactatgtgaacatatcacatggtaagggacagagcaagtgtgaaataaagaagccaggtaattttaatgagccagctctcatttaaattaacagagggtaaagtttttgattaccaagagggtgatgccaagctattcatgagaaatttgcccccatgactagaacacctcccaccaggttctgcatccaacattgaggactgcgttgcagcatgatgtttggggaacgtgaacattcaggttgtaccatagataaactaggcttaacagacatgtaaactactttccagttaaaagcaagaaaacacacaatattcttatttgcacctggtgtattctgttaggatacacaacaagtcttattaaatttaggaataccaggtgggtgctgtggctcatgcctataatttcaacactttgggagaccaagatgggaggatctcttggggccagaagtttgagaccagcctaggcaacacagtaagactccatccctacaaataatcaaaaaattagccaggcatggtagtgcatctctgtagttccagctagtcaggaggctgaggtgaaaggagcacttgagccctgaaggttgaagctgcagtcactgcactccagcctgggtaacagaaagagatcctgtctcaaaacaacaacaacaacaaataaatgtaagaaaataaaaattgtacactaaatgttttctgactaagactgaatgaaactggaaattgagaacacaagtaaaactggcacatccaaatatacatgaaaataacacatactcttcaacatagttttactcaagggtcaaaaaatttaatttttcaaagatgtctgtataacttacagtgatgaatatattcaatataatttctataaaaatccccaaagtggccgggcgcggtggctcaagcctgtaatcccagcactttgggaggccgaggcgggcgtatcacgaggtcaggagatcaagaccatcctggctaacacagggaaaccccgtctctactaaaaatacaaaaaaattagccgggcgtggtggcgggcacctgtagtcccagctactcgggaggctgaggcaggagaatggcatgaacctgggaggcggagcttgcactgagccgagatcgtgccactgcagtccagcctgggcgagagagcaagactccgtctcaaaaaaaaaaaaaaaaaaaaaatccccaaagcacaagttttacaagaatattgtttaaaattttaaaatttgattataaactatagccaaacattcatgaaaaagaacaaagaggtgttatacttctggattttaaaaaatattaatagctacaaaaacaaggtggtactgacacaaagacagataaacagattaaaaaacagaatagagagcccagaaataaactcctcagtatatgattaaataatcttttacaactttgccatgagcacacaatagagaaaagacaatctcttcaaaaaatcatgttgaaaactggacaccaacactgataaagctggattctttgaatcatatacaaaaaatattttaaataaaatacttaaacatataaaaataactaataaatctcttagaaaaaaagagaaatgacatgacgttgttcttggcaccattttttttgatatgatattaaatgcatgagcatcaaagaaaaaagtaactacactacaaaatttccacacatcaaaaaaacattagagtgacaatgccttgtagaaaataagtaaaaatatttgcaaattatatgtgataagagttaattgcagggagctaaaggcccgagggtcatgaccaactcagcattccactgaaggctatatgatcaaacagcaaactgtttatcatgaatgcaggatgtgggcaaactcacatctgtgcctgccaccagaaggtttgctgagggcagtcactccctggtgccatgctccttgaggttatctactggaacatctggagactactgttcaaagaatgcagttgtgcaagcctgcactaagtaaagcagctgacagacaaccacccccttctccctatctcctttactcaataaatacaaaggggtatagaagttcacggcccttattcactagaagcaaggagccccctgaccccttcttccaaatacactcttttgtctttgtctttattcccacgttcatcctcctttgttcagtccagcaaggtccatggcagttaatattgagaatacataaacaagtcttaaatggactaataattgaaataaattttaatcaaaaaaatacaaaaattggaaaaagcatttgaaaagacacaggaaattacatttgtagagaaatgcataaaaatcacgtgaaaaaaactcaaaccaattagaatggccactatcaatttttttaaaacattaaatctgttgatgatgaactgaaaatccgttatttgttggtgtaaaacaaggatgcagccactgttttaaaatgttatgttacccaaataattaaaaatggaatcattaaatacaataattcaatttgtaaatctatatgcaaactctgcaatgcaggagctagaaggcatatttgaatattgatgtttactgtaccagtattcacaaaagccaaaagactgaagcaaccctttcttgacttacaaatacatcaaaaaatgtaacatataaatacaatggaatattattcagccttaaaaaaaatcttgtcacactttaagacaaacttcgagaattattatgtcacctgaaataagccattaacaaaatgatggctactatatgatcccatttataggagatatcttaagtagtcacgctcataaaaacagaaagtagaaggatatttgtcaagggctggagagagggtaaaatgttcagctgttacttaatggatattgagttttagttttattagatgtaaaatttttaaaagtcttttgtataacaatgtgaatacacttaacatgtctgaaaagtacagcttttttctgagacagggtctcattctatcacgtaaggtggagtgcagtggcacaattatggctaagtgtagcctcaaattcccagactcaagtaatcctcctccctcaatctttcaaagagctgggaccacaggtgcacacaaccatgcctgggttaaaaaaaaaaaaaaaaaatttgtagagtgggaatctccatatgttgcccaggctggtctcaaacttttgggatcaagcaatcctcctgccttaagatcctcaaattctgggattacacatgtaagccacaacctggaatgtacacttcaatagatttaagacaatacattttatgttatgtgtttttacaattaatttttctcaaaaaaaatctgaaaaaattcagaatcataaatcttttcataaattaccttcaaatcacaaaagtgtttgtctcacacagagcaaatacatattcatcattaaacacatggtgaaaataaaactatttccatgactactcaattagacaagataaaacaatcactgaaaatcaactaagaaaaaaaaaaaagggccgggcaccgtggctcacgcctgtaatctcagcactttgggaggccgaggtgagcggatcacctgaggtcggaagttctagaccagcctggtcaacattgtgaaaccccatctctactaaaaatacaaaaaatatctgggtgtggtgacatgagcctgtaatcccagctactcggtggctgaggctggagaactgcttgaacccgggaggcagaggttgcagttagccaagattgcgccattgcactccagcctgggcgacagagtgagactccaactcaaaaaaaaaaaaaaaaaaaaccaaaaaacaactaagaaagaatatatacaagataagtcataaccaaagctgtggttatatttacagataaacacacaaacatatatactctcattgtgatagacatatggctgatgtacctcttaagtaaaccccacattgacttaaagtgtacaaacagaattgcaaattgtctaaaattataatacatatgtaaaactaaaaagcacaagaaactaatattaagaaacctacactaaaaaaaacacactagtaggccaggcacggtggctcacacctgtaatcccagcacttagggagactgaggtggacaaatcacctgaggtcagaagtacgagaccagcctggccaacatggggaaaccccatctctactaaaagtactaaaattagccaggcctggtggcatgtgcctgtagtcccagctactcgggaggctgaagtggtaggttcccttgaacatgggagctgaaatcactccactgcacttcagcctgggcagcaaagtgagaccgcatctctaaaaaaaaaaaaaaacacccaggcgcagtggctcacacctgtaatcccagcactttgggaggctgaggtaggtggatcatctgaggttgaaggttcgagaccagcctgaccaaaatggagaaaccctatctctactaataaaagaagtacaaaattaaccaggcatggtggcacatgcctgtaatctctgctactcgggaggctgaggcaggagaattgcttgaacctgggaggtggaggttgcagtgagccaagactgcgccattgcactccagcctgtgcaataagagcaaaactccatctcaaaaaaaaaaaaaaaaaaaagatctggtttgcaaaacgatgtaccattaagaatttatctaaataggctgggtgcggtagctcacacatgtaatcccagcactttgggtggctgaggcaggcggatcacctgaagttgggagttcaaggccagcctgaccaacatggtgaaaccccgtctctactaaaaatacaaaattagctgggcgttttggcacatggctgtaatcccagctactcgggaggctgaggcagcagaattgcttgaactctggaggcggaggttgcagtgagccgagattgcgccattgtactttagtctggcgacagagtgagactccgtctcaaaaaaaaaaaaaaaagaaaacaaaaaaaattctattctctagataaccgtaatatgtgactgtgttcacagaaggcaagtattttgaataactggcatgtgctccatggcagtaaaatttcaaaggaaatggagtgtaatcataaacagaagattctaatgagaaacttttaatcaataagcatttaaaagaaactagagacaattttatttatttatttatttttttgagatggagtcttgctctgtcacccaggctggagtgcagtggcacaatctcggctcactgcaacctctgcctcccgggtttataccattctcttgcctcagtctcctgaatagctgggactacaggcgcctgccaccatgcctggctaattttttttgtatttttagtagagacggggttccaccatattagccaggatggtctcgatctcctgacctcgtgatccgcccaccttggcctcccagagtgctgggattacaggcgtgagccactgcgcccggcctgaggttggaaaattgcttcaggccaggatttcaaaaccagcctgggttatgtagcaagacccaatctccaaattaagtgcctttaggagagctttgagatccagggagggagttgtgaaactgctaatgcccaattctgaggagtgctatttttcagaaggcaggtggcaaactacagaactcctatttttcagtatagaccaggaaatggactacccaacttggtcttactgatcattctgaagttactctgtaatcatctcagacttttcccagccacagtctgtaagaggtcacataccctttcagaggccttgagaaagacacccacttatagccatgcagcaggcctgcagaccttggcctttactgtggtccttaaagcagttcaatgactcagtttcacatccaagccacagttcacagccagttctgcctatgttaaagcccactgagtgacctggaaaaatcctctctgatacacagtgaatgccatactcatccacattcttaaataagactcaaccatatacacagacctgactgcagaaacctgccctagtgactgccctacaggtcaaagtcttgagagaaattcagtctgtctaaaaaataaagtgttaattacaactacccaagccccttgtaacaagccaactaaaggtggaccctagtgcagacccagcagccttatgaccaagctacatgccctctccactacaaacccagagggcatctcattaccctgggggcccaacaaaagacctttaccttctgaaaacaggttataaaaacttgaagaggcttttgctttttcaagtttaaagacactaatacaaaactatattttgcctatcgtcaatgcttctcttttaacaaagaactgttagtacgtggcaaaagaattagtcaaaaaaatgaaaaagagccattgaaattgaagacaagtaagtaaaaagttgctggttgcagatcatatgatagtatatgtgtatatatatagagtacattaaatcctgtctaaactaataaatacactcagtaaattagcaaaatattaaattaacgtacaagttatggttccatacacttaagctatcggataaaatatttaaaaaatcttatttacagccaggcatggtggctcatgcctgtaatcccagcactttgggaggctgaggcaggtggatcatctgaggtcaaaagttcaagaccagcctggccaacatactgaaaccccatctatactaaaaatacaaaaattagccaggcatggtggcatgtgcctatagtcccagctacttgggaggctgaggcaggataattgcttgaacccgggaggcagaggttgcagtgagctgagatcgcaccagtgcactccagcctgggcaacagagcaagactctgtctcaaaaaaaaatcttatttacaatagcattaaaataaatttctgagaagaaatttaatcaaagaggtagaaaatctttacaatgaaagatatatcaatgagagaaattagaaaagacacaaataaatttaaaaatatttcatgtctatagattgaaagaataaatactgttaaagtgccatgttggccaggcacggtggctcacacctgtaatcccagcactttgggaggctgaggcaggcagatcatgaggtcaagagatggagaccatcctggccaacatggtgaaactctgtctctactaaaaatacaaaaattagctgggcctggtggtgagcacctgtagttccagctactcggagggactgaggcaggataatagcttgaacctggaagggagaggttgcagtgagccgagattgtgccactgcacttcagcctggagaaagagcgagactttgtctcaaaaaaaaaaaaaaaaagtgccatgttattcaaaatgatctatagattcaataaactccctatcaaaattccagtggcgttttacagtaatgaaaaatacaagtctaaaatttatatatgaaactacaataaactttgaatagtgaaagcaatcttgagaaaaaaaaaacaaagctgaacgacatcatactttataatttcaaactatatttgaagactatagtaatacaaacaggacggaatatgcagaaaaatgaacaaaaacctactactctcacacatttcagagatgatgcaaaaaaagaacttaacagagtttctcaaaattatgcagatatttgtgtgtcccccaaaacaatggaaaagcagtcagattgtgcagtctcttacatgccattaaggagactttggctctcactctaaactagaaggcagatcactgaagggaaagcagagtcctgagagaacttaaaagcgtaagacagaagactcccttatgtgagagcaaaatagaaaaactcggcagggtggcgtggctcatgcctgtaatcgcagcactttcagaggccaaggcgggcagatcacctgaggttaggagttcgagaccagcctggccaacacatagtgaaaccgtctctactaaaaaaatacaaaaattagctgggcgtggtggcacacacctgtagtcccagttacttgggaaggtgagacaggagaatcgcttgaacctggagatggaggttgcagtgagcccagactgttccactgcactccagcttgggtgacagagcgagactccatctctcaaaagaaaaagaaaagaaaagaaaaactctggctttccagaaactatttcctttggaatacagcttcccaaatcacattataagcactagctttttctttgacctttgaaccgctcatctatgttatctgttgtattcactttcactctcacctacctgggggttcggccaccatcctatgtctctttctagtccaaggctctttttcttgttccagacaggtgatcaggtctggcttagagacaacaatacctgttttattgaaagtaaataacataaatcttgcttatattgtctaatcaccaacatggcaatgtagtcagtaaagagggtgaaatagaatattcttgtaaatcaatcccaaaatactgatttataaaagaaatttctaaatatttagaaaatattttaaatttgttagttcttaatttcactgtccagtacaacaaatcaaaaactggtgttggcaattagattttaaagtgtgagcaataatattttatgccactaaacttctggaattaccactctaatctagagtgaagaatacagattagctcaggaatgcagaaagttcaggtcaagatgaaatatcttgaagaaattcttttctacagagatgaatccctaagatttttataaaaacagggatctgaaactcacttatgcaaagcataaattacctaaaaacattatacaaaaaagaaaaatgaaacctttagggtataataggaattgtatattgaagttatcctcacccaagaagaccaggtttctgtagttctctaacatcacattcctatataaattctgctgtatagtgtccaggcattgccactcctccagagagaattctatggccacatccctaaatttcaatggttcctgaaaaacacacacacacacacacacacacacacacacacacacacatacacatttagaaagtggccatggaaagaatttataatttgattcaaggtaaaataagaaagtgaagagaactggttctgacttacagaaatgactgaaattatccaataaaataatttttttttacacaggaacattctctaatttgttctccaaccatgagaaaagaaagcggcattagatctataacaccagacctaaataaatcgccagtcagaatggcgattatcaaaaattcaagaaacaatacatgctggtgaggctgaggagaaatatgaatgcttttacactgttggtgggaatgtaaattagttcaaccattgtggaagacagtgtggtgattcctcaaggatctaggaacagaaataccatttgacccagtgataccatttctgagtatatactcacaagaatataaataattctactataaagacacatatgtggctgggcgcagtggctcaacctgtaatcccagcactttgggaggctgaggcgggtggatcatgaggtcaggagatcgagaccatcctggctaacctggtgaaaccccgtctctactaaaaatacaaaaaattagccgggcatagtggtgggcacctgtagtcccaactactcgggaggctgaggcaggagaatggcgtgaacccaggaggcggagcttgcagtgagctgagatgatgccactgcactccagcctgggcgacagagcgacactctgtccccccccaaaaaaagacacatatgttattgaatcactatttacaatagcaaagatatggaaccaacctaaatacccatcaatgatagaatggataaagaaaatgtggtacatacacaaccatggaatactatgcagccataaaaaagaatgagatcatgtattttgcagggaccatggatgcagctgaaagctattatcctcagaaaactaacacaggaagagaaaaccaaacactgcatgttgtcactcattagtaagagttgaacaatgagcacacataaacacaaggagacaaaccatacacaccagggccagtcggggggtggagggacaaggagagaaagagcattaggataaatagctaatgcatgccaggtttaaaacctaggtgatgggttgataggtgcagcaaaccaccatgacacatgtacacatatgtcacaaacctacacgttctgcacttgtatcccgaaacttaaagtaaaatagaaaaaaaatatattataaaagactatacttagaaataaatgataataaaaattatacaaaaatttattttttttttgagttggagtctcgctctgtcacccaagctggagtgccatggcgtgatctcgggtcactgcaacctctgtctcgtgggttcacgcaattctccgacctcagcctccagagtagctgggattacagatgtccgccaccatgcctggctaatgtttgtatttttagtagagatgggctttcaccatgttggccaggctggtctctttgccaggctggtctcaaactcctcacctcgtgatccacttacctgagcctcccaaaatgctgggattacaggtgtgagccacctcacctggcttataaaagttatacaagctaaaagtgctgagatacaacaaaaagaaaaagaaaaaaaattatgttacagggcactgtgcctgggataacacattatgtaatttaatttttataacaccctgggagctggtactgtttaataattcccaggatttagatgaaaagcccggcatttttatttcttctgtttctctgtcattgattttttttaaaaagtatacacaataaaagctaaatatagacagagaggaatgcggaaagaatttaatgtattttagagaaatttatattgtgtctgtttacttgtttgtgacttgtagagcaactactagatctgtaagaatagaaaacaagttgctagatagaatgcaagcactagttttaataaaaaattataaccataaaatatatactttatttttttaatttatctgcttttgtgtttcaggaattgtaagcaccagccctagcagcagaattcaccagccaaaactccgatctccaaaaatcagttctatgaggcaagacttaagggtagggccagacctaaataaggcctccaaaaaggtgaacctgagcagaactggggcagggagtggactctatatagaattctgttctctatgccactggggtatttccagttctgtttttcctaaacttaccttaaaaaaaaaatccttaaatctcagagtttgtataattttaatctttcttagaccctgccctatcaattatatgacatatactaataagcaatttgaacacatttataaaggttttctagggtaattttattaaaagataaatatgtattaacaaggtaaaagaaatggaaatagaaataattcttctgtctataaatatcccttcaggtgatgacatcgcaagtcacaattatataaagtggcacaaatagagcccaaattttctgcacacatctatttattgtaccaattatatgatgcttaatttaaccatttatccagttgctagactaaaagctcctggattgtagggaccatgactgcttcatctatttttctaatggccatatgaaaagaaaacaatttagccgggcgtggtggcaaatgtctgtaattacacctactcgggaggctgtctcggcctcccaaagtgctggaattacacgcgcgagccaccgcgccaggccttttgactctcatacatttttaatgaaaggaaagagagactaggaacgccacggaccaaagctcttcccattcatgaacccggcacccgtcaggattcgcccctgacgaccctcccgtggtccctgcacaatctgggagagacccggcgctgcggatgcagagccacccagagagagctgcaggccaggacacagtcactgagcagggaggagaaaggacgcccggggggctggctgtcagcgcagccgccatcttatggtccaagtggactgaggccgcctgggcgaggagaactcagggcgcaaattgtggagctgactgcggcgaggtctgagtcccgccacagccccttcccctctctcgggatgtcggacccgacattctcaccatttctaggtttccgggggacctggcgtcttagctatggatcgccaatacctgcaggtcagagggccatagaggctgggcctctagaagaagaggacacagagcagtgaagacgagacccggagctcgggctgaagggagagacaaaggccccgccaatcccggaagccgccctgtctgctccagctgcatgcctgattggacagttcccagcccagcgtccctgactggataatgattaaaaccccacccctcaggtcctgagtgacagaagatgtgatcagatgctctgctgaatgaagactaacaacgtaagttgcagcgttttcagacagggctccctccctgagctaagccaggcccacccaacagggtatttgcctttaaccttctgtgtaaggtcacatgcatttcaaataatatactagatagctattcaaaaataaaaatatatataataacaattattttaatatttcatcttttatgaccgtcctggtttctggcagccatagtccctaccccgacagcccccagcccagatggcattcaaatcttcctggatgggcttgatgcccgtcactcacgcgctctttagcactgcgttgtgttggttactcaggcctgggagaggtggtggggattgtagatccagggtaggagccaccttacacccagagttcacctggccacatgccagcaaggaagcccatgaagcacagccctagacactgagcctcggcacctccagctgcactttctatttatatatcaggtttttttttttttttttttgagacggagtctcgctctgttgcccaggatggagtgcagtggcacaatctcagatcacaacaacctctgcctcctgggttcaagtgattctcttgcctcagcctcccgaggagctgggactacaggtgcgtgccaccatgcccggctaatttttgcatttttagtagagacggggtttcactatgttggccaggctggtcttgaactcctgacctcgtgattggcccgcctcagcctcccaaagtgctggggttacaggtgtgagccaccgcgcccggcctatatatcaggtttttaaaaccataaataaacagacacaaaagcagccactttgattgaggagaaagtgggagcctaaagcagctgaccctcaaacagctttgccaagcctcaggccaggccaggccatctcaacactccaaggctacatgatagttacagaggacgacagttcccataggtacttgtcaagcactgtgctagcttctcagtcacagagtctcagaatttctccttgccaataccctgtgaggggaggccctaactcactagagcacaggaggttcctaagctcttcccaggaaatggttaacaaagtgtggagctgggggaaaacccagtcagaacaaatgacttcccagggtctcccttgactccatccctatctccacatggggccaggaggtgaagcgagccccctaaccccctccattccactctctcctcaaagtggctgtttttgtgttttcttatttatgggatttcaaaagcctgatttttaattttgagtagtttcaggcttgtatgggtgtatttgtataggctttattagaaggaagagggcttaagacaataacatttttaaaatgtctcagtggggaatagacttccatgtcatgaacgatgatgttgacctccttctgctgtctttgtgcaaagtataaatagtgtgagaattggcatgtgctgggttgtggtttcagtgtgggagggcagttccttaagatggaaaccaaatctcaccgagctgtagcagccacactcaccttttatcacattccccaccatagtctttcacttttcttctgtgcttaaatttctttcaacatatatatatatatatatatatttttttttttttaagacagagtcttgctgtgttgcccaggctggagtgcaatggtgcagtctcggctcactgcaacctctgcctcccaggttcaagcaatcctcctgcctcagcctcctgaataattgggattacagatgcgtgccaccacactgggctaatttttgtatgtttagcagagttggggttttaccattttgggcaggctggtctcgaactcctgacctcaggtgatctgcccacctcggcctcccaaaatgcagggattacaggtgtaagctaccatgcctggcaaacatacatattattttgattatatatatagggtgtataaatatatgtgtgtatatatatatacacatatatatagggtatatatgtgtatatatatatatgtttgtgtgtgtgtatatatatatgtgtgtgtgtgtgtacacatagaggtctcactctgtcatccaggctgaagtgtagtggctgaatgatgggtcactgcagcctcaacctccagtgatccttctacctcagcctcttgagtaggtgagactataggcaggcaactccacacaaggccaattttctaaatttttgtagagactgagtctcactacattgcccagactggtcttgaacccctgggcttaagcaatcattccaccatggctttccaaagtgtttggattacaggtgttagccatcaaacccagccaacaatattttttaaagaactgttacaaccaaattatgagctatggttgtgccactgcattccagccagagcaccagagtgagaccttgtctccaaaaacaaaacaaaacagaaacacttatgaccaaattaaaattctaaggttgtgtcctctgtgtccccttcttgccctgtaaactatcactgttaaatataatgcgtattgagaaaactgttagatattattaagaaattcctatatatcttctaagtgagataaggtattctaatgtgacccaatatttcctcacccctacctccagggtctaaactagcaaatcaaatcaggacatccacaaaggacagttggccatgttcaattagaaaattaaatatccccgttagtgagagtaatccagtgattttaaaaaagagaagtcaaactgaaatgcagcgtagtcacggcacaattaccctggaatagccacttcacatggaatgactgaggagcctttctaagatgaacaaatttgggtaacgtaattctttctttctttctttctttttttttttttttgagatggagtcttgctctatcgcccaggctggagtgcagtggcataatttgggctcactgcaacctctgcctcccgggtgcaagcagttctcctgcctcagcctcctgagtagctgggattataggcgtgcgccaccacgcccggttaatttttgtatttttagtagagacggggtttcaccatgttggtcaggctggtctcgaactcctgacctcgtgatcagcccacctcagcctcccaaagtgccgggattacaggcgtgagccaccgtgcccggcccggtaacataattctttctaaaccattctcagcctgggctgcctcccacccccgccttatttctaatggccatcccacgatgtggtcagcagtgtggtacggcatggtgagagaggcgctcagggatgggatgaaggtctttcccgcattatgaaaatgattaaaaaatgtccaaatgggcagggcgcggtggctcatgcccgtaatcccagcactttgggaggctgaggcgggcggaacacctgggatctggagttcgagagcagcctggccaacatggtgaaacctcatctctactaaaaatacaaaaagtaccagggcgtggtggcatgcgcctgtaatcccagctactcgggaggctgaggcaagaaaatcatttgaacctgggaggaggaggttgcagtgagccaagatcgcaccactgcacttgagccagggcaatgaggcggaaactcggtctcaaaaaaaaaaaaaaaagtccaaatgttctttcttacccttaagtagcaaataagatgcattatacaagacccaggtaaggaaaagagcaagtgcatttcatgtctcagcttacttcttaattagctgtaattccctgtgcatgttaccttacctttactgtccgtaaaatgccctactgccgagcggggcgggtggtggtatggagagaatgctgttgctttatccaatcagtggcgctggcgcgggaaccgcccaatcaggggcgcagccggagaggagggcgtggcttccgacattccgcggggtctttacctcttgctcccgccagagtttgggatcggtctcttctgttccgcgtcctccacctcggtagcccctggtgactctgttacagcctctgttgacctatgatctgcagggagacgcacagccaggacatcctggaacctgggaaagggtgagtgtgcggggttgggcaacccgagaagggagaccaggctgtgaaaccagcagaaccggcctctccacagtccgctcccaggtcgccgacctgagtccccgctggcgcagctccgtcccaggcccctctggccgcaagatggcggctgggcccacagccgggaccccagcgtccagccccgtccgtgcggggccatgtctggagccccctgagcaagctcttcacgcagcctcgagtatttcccaggttgttcagggatgccaggcgggtcataagagcagaatcccgacccggtgtttgcgtgggaagaactgcagcctatggggctcccagtgtcttttgttaaacattttgtttgagacggagtcttgctctgtcgcccaggctgaagtgcagtgcgtgttcacggcaacctccgcctctcaggctctggtgattctcgtgcctccgcctcccgagaagctgggattacagacctgcgccaccccgcctggctaatttttgtatttctagtagagaagtggtttcgccatggcggaaggtggtctggaactcctggcctcaagtgatccgccagccttggccccccaaagtgctaagattaggaggagcatgaggcactgcgccaagcctcttctcttaaaaattaaagggagtcagggttaaaaccttaaagaggttatttgagccgtgattggtgaaatggaaagcaccccagccatagtatgtggcccacctgagagacataaagcaaagggttttataaagggcgtgtgagaaggcaaaccaaatgcaagaattggttagttatgtagtcaccttatttgtatgatacaggtggaaatttcctggttatgtaatcagaggttaattgcaggtttatgattggttaataaaattcaattatgattgaattttgtttccgcctaaaatagtaatctataagatataaactcgagttaggttttacattttttacttatgaacacagggcactagggccacttcagtctaatttcctgctttttaattactttaacactccacaggaggaggactggttttcctctgtgacttcctaatgtatggcaagcaggacttcttctaatccactaccctcttcccctagcttaactaaggcttgcagtaaaattataaatttccactttctttcctacattctcaaatgtaggaaatgaggacaaacaacttcctctctccaatttacaacactatcaactatttgtcctttattgtgcatttcagacacagtgttttaattgttaatcatgtttttacactgcagtggatggcaggtttttaaagatttgttttctgtttgtaaacacttttttattggagacagagtttcattcttgttgcccatgctggagtgcaatggcatgatctcagctcactgaagcctctgcctcccaggttcaagtgattctcctgcctcagcctcccaagtagctgggattataggctgccaccactgtgccctgctaatttttatattttgagtagagagtgggttttgtcttgttggccaggctggtcttgaactcctgacctcagatgatttatctgcctcagcctcccaagtctgtaaacattttatgtgagaaaaaaagtagaaaataatcctctggaactccactttaaaaaaaaaaaaaagtctgcgcctctccttcttttatcttccctaggcacacacaccctactagtacgtctttgggttgaagttttgctttggagaaattacagggcctttacagcagccctttagtctattcttggtaatgagtttcagaactgtctggggtaactcaacatacccacagtggccatatatcttggagtgtctaatgagtatcatcccctgagtcgtctcttagaggacagtctgaggagtaagagtgtagcctctcagaagagcaactggatggcctaggcctgtggaaaatttccttgtatactatttgtctaaaaagctaacctcttagaaaattaaaattattttttcacaaaggaatgcttctacactgttggtgggagtgtaaattagttcaaccattatggaagacatggtgggaactccctgaagacctcaagacaggaataccatttgacccagcaatccattattgggtatttacccaaagcaatatgaattattctattataaaggcacatgcatgcgtatgtgcaccgcagcacacttcacgatagcaaagacatggaatcaacctaaatgcctatcagtgatagactggataaagaaaatgtacatataaaacatggagtactgtgcatctataaaaaaaaaatgagattatgtccattgcaggaatgtggatggaactgtaagccattattcttagcaaactaacacaggaatagaaaactaaataccacatgttctcattataagtgggagttaaataatgggaacacatagacccgtagaggggaacaacacatactagagcctattggaggagggagaggatcaggaaaaataacttatgggtagtaggcttaatacctgggcgatgaagtaatctgcacaacaaacccccatgacacaaatttacctatgtaaaaaatttgcaatgtacccttgaacttaaaagttaaaaaaataatttgttagcttttccaataattccctgatagcgttttgattttatgtgtgtatgacacctattatgtatcagaaatttggattacacagatgaacagggttcaacatacctgccgtgtaggagtttatagttcattagcatggataggtgtgtaaaaaattaatttattctggagaataatacttgtacataaaaagacataaggtattgagctgtaaggtaatagtgatcaattctgccactaacatagcagtgggaatatcaaggagggctttatagaagaggtgacatttgagtgggtgtcattgtttaatagaactttttgtattaatgttgctggtgcggatatttcatttcctttttttttttttttttttttttttttgagatggagtctcactctctttcccaggctagagtgcagtggtgcagtctcggctcactacaacctccacttcccaggttcgagtgattctcccaccgcagcctcccgagtagctgggattataggcatgagccactgtgcccagcctcagagtgtaccctttaaaaaattattttaaaaaaattttacctcttgactctgaaatatattgagaggtcttcccccaatgagataaaaatgaacaagtgtgtaaacagttaagaagttttttctcaagctaattttttttttttttttttgagacagagtcttgctctgtcacccaggctggagggcagtggcgcgatctccccggctcactgcaagctccgcctcccgggttcacgccattctcctgcctcagccttccgagtagctgggactacaggcgcccaccaccttgcccggctaattttttgtatatttagtagagacagggtttcaccgtgttagccaggatggtcttgatctcctgacctcgtgatccgcccgcctcggcctcccaaagtgctgggattacaggcctgagccaccgtgccgggccaaatgtttttttttttttttttgagacggagtttcgctcttgttacccaggctggagtgcagtgtcgttatcttggctcactacaatcttcacctcctgggttcaaccaattctcctacctcagcgtcctgagtagctgggattacaagcgcctgctatcaaggccggctaattttttgaatttttgtttgtttgcttgtttgttttgtgtttttgggagacagagtcttgctctgtcatccaggctggagtgcggtggcatgatctcggctcactgaaacctctgcctcccggtttcaaaccattctcctgcctcagcctcctgagtagacaggtgcgtgccaccacgcccagctaattgtatttttagtagagacggggtttcgccatgttgcccaggctgttctcgaactcctgacctcagattatccacctgcctcgccctcccaaagatttggggttacaggcgtgaaccacggtgcccggcctaattttttgtatttttagtacatacggggtttcattatgtttgccaggctggtctctaactcatgacctcaggtggtccatctgcctggggctctcaaagtgcagggattacaggtgtgagccaccacgcctggcctctcaacctgatttttatttttagtagacacattggtgatgagacaatcaaatgttcgcattgatgagaaaaggcagaaatgatttttgttctctggattcttgaaataaaattttttccaaaggacaagaagatcccatcccagtaaggcaatgcaagaacctgcaagcaaaatgtacctgagactcacagtggggtacaaagtgtctcctgggaaggtggtcactgagtaatttaataggcaggatggggatgacagaatattttgagtgatattatggtctgacttgacagtggagtcagacatgtttgtgtcccaatcagcactgccacttcctgagtttgtcaccttggaaagattttttcacttatttcaatttcagtttttttttttttttttttttttgagacagagtctagctctgtcgcccaggctggagtgcagtggtacaatcttggctcaccacaacctccgcctcccgggttcaagctgttctcctgcctcagcctcctgagtagctgggattacaggcgcccaccagcatgcccagctaatttttctatttttagtagagacggggtttcactgtgttggccaggctggtctggaactcctgaccttatgatctgcccacctcagcttcccaaagtgctgggattacaagcgtgagccaccacgcccggcccaatttcagttttttaataactgtaaattacatttcatcagaagagcttaaaagatgtttaaaaagtcaacgactatgaaaggtatatttcagaaaaatctagtgatatgttttatttgttaaatttatgtttttttctggttgtgtaattttaaatagaaccccaggggtttgctttgagaatgctaccagagaagagaaataggaaaaatcttttttccattatggctatacaaagtgaatacatttccacaagcaaatatgatagattaattggtgcattgtatatatttctcaaaccatcagctcctctttttttcaaagtctagaatttgtaatggtggatatctctgttctgtattctgttgtctagatatccaagtttaatgcaaaattttatgacatggaacttgacactttctagaaatgttcacatatggttgtttattaaattatctctcatggaaatatttaaatgacatgtttattgtctgaaaaggacagatatttaagctttttttttttttttttctttttttttgagaaagagtctcgttcttttgcccaggctggagtgcagtggtacaatcttggctcactacaaccttcacctcgcaggttcaagcgattctcctgcctcagcctccctagtagctgggattacaggtacacaccaccaggcccatctaatttttctatatttagtagagacagggtttcaccatgttggccaggctgttctcaaactcctgacctcagccaatccgcccgcctcaacctcttaaagtgatgggattacaggtgtgagccattgtgcttggccccctttaactattttatgtgactcttctctcttacctgaacgttgcccaaaaagagattgtgacatatatttgggcccagcaccaaggtgatgtaactctcctcttcagccgggccttgcccacagaagagagaatgacttattcctgagtttagcatacaggtgatttgattcttctgctgactcccagaagtcactgtaacatatatctgggtccatcgctgagactgtgtgactctcttctccctgggacctgtccacagtggggattgtgacgtattgcttggccaagcacctacgtgatatgactcttttcttaggcctgggccctacccactggagtgattttgacacattgctgggcctagctcaaaggttatatgtgacttcacacttcttcctgggccctacccatgaggggcactgtgtcttaactctgagacacttaattaggtgatgtgactctcttttttcgagatggagtctggctctgtcacccaggctggagtgcagtggcaaaatcttggctcactgcaacctccacctcctgggttcaagtgattcaactgcctcagcctcatgagtagctgggattataggcatgcaccgccacagtcagctactttttgtatttttagtagagatgaggtttcaccatgttggccaggctggtctcaaattcctgacctcaagtgatccacctgccttgacctcccaaagtgctgggattacaggcgtgagccacgatgcccggccgatgtgtctcttttgtttggaccctcttcttgggatattgtgacatattgctgggcccaaaatctaggtgatgtgactctactctttggtctctgcccaaaaagggattgtggcatatcactgggtcaagaacctagatgaggtgactctcctctccagtctgggacctgcacacattgtgtgttgagacatatcactgggtctaacacctaggtaatgcaactctcctgcaagggccccgcccacagaagtattatgaaatatctttatattaatcacctaggtgatgtgacactcctcttctgcctgggaactgcaaaaaaagtattattacatatcactgggcccagcacctaggtgatgtgactctttgctcatgcatgtgctctgcgaactggggtgtttgttacatatagttgggcctaaaccctaggtcatgtgattctttcattttcctgagccatactcatagcattttgacatatttttgggcccataatttagatgatgtgactctcttgcatgggccctccccataaaggtagtgtgacatattgttgagcccagtacataggtgatgtgactcatagttctctatggattgggctttgcccaagcagggattgtgatgtgttgctggactcaccacctacgtgttatgactctcctcttctgcctaagccctgcatgcattgtgtgttgtgacatatgcctggattcagcacttaggtgatataactttatgacatgggaactgcccatggaagtattatgacatgtctcctttccatcacctaggtgatgtgacccttttatttttcttgtttctggcatattttgggtatagtgacgtatcattgagttcaacacccatgaaatggaggcttctgcctgagcccagcacataagtggccttgtgaaatatctttgcattcattatctaggagatttaaccccccttttctgcctgcaccctgaccactgggaagattgtgacgaatcaccggtctcagcaatcaggtgatctgtttttcctgcctggtccttgcccacagatcattgtaacatatcactgggcctagcatctaggtgatgtgactctgctgactgtattctgctttcagggggagattttaacataaccctaatcaagcacccatgtgtgggtgtggcacttctgccttatccctgccctcagagaagattgtgacatatcactgccccaaaatgcggtgatgtgagtctactggtcaatacctattcactggtgggattgtgatgcatatcttatccaaacttacaggtgcaataatgactctcatacctctaaacaaccagtagcagatgtagtttctctcatagccagggtcaggaaaatgagtaatatcctgggcctcctctttgtatgaaggtcataaagaattaacactctctcacatactgtgtaaagttgtcaagaggtacagagaatgtcctaacagaactcagcacacaggggaggttgtgacactcatatgcatagcctgccaacagtaaagactgtcatccttccacataaacacagctcaatgttgaggttctgaatctcatacccagctgcagtcaaaagttggaaaattgaatgtcatgttaattcagtccatagagaggtcagtgtctctgagaccaagattcagcacatgtgtgagttgttgacttcaataaatgacacaatttgcaggagggattgaggttttcatacacaaatccagaccgtcattgagactcattcatgtacttatacccaacatacagagggtattatgtctcatacctagaactaaaaaaatgtgtgaaattgttaatctcatacctccaccttcatccagatgtgattgtgacatacaattctgcccagcaactgagtgatttgactctcctgcctgggcccagtgtacagacggggttgtgccatattgctcaacccagcatttaggtgatgtgaatctattcttttgtcctagtgcttttcacagagggcattggacatatcactgtgagtaatgtccaggtgatgtgacttttctctacttcctgggcttttcccaagaagggactgtaatatatttctgggtccagaacctaggtgatgtgactctcctctcctgcctggtttctgttgtacattgtgttattgacatgtggctggttctaataccttggtgatgtaaatctcctgtatgggccctgcccacagaggtgttatatcttttcattcatcacctaggtgatgtaattctgtttttctgcctgggccctgccggaagggaggattgtggcatatcactaggcccagcacctaggtgatatgattcacctgtttttcctgtgcctcacatattttgagtactgtaaaatattactagacctaccacctatgggattgcgtgctcctgcctgggctctgcccacagggacattgtgacatatatctgcatccatgaagtaaaagatgtgacatttcttgcctgcaccctgccctgcacaggaaagattgtgacatatccctggaaccagacacaaggtgatttggctcttctgcctctgtcttgcccccagggagcattgtgacagtgctgtgactctgttgcctgtgctgtgctttcaggagagaattgtaacatatccctggctgagcacctaggtgatgtgacactgctgcttggttccttccctcagggaagatatccttggctgaaatcccaggtgatgtgactctcctcctaactccctacctacaggttaaatggtgacatatactatagtcagcttataagtgcgatgattactctcataactcaagtcagctattagaagaaatagtgtctctcatagcttgccttagatgagtcacatccttggtctctctttttatgaaggtcataaagaattgccaccctcccacatatcatataatgcccttgagtgttacaaagagtgttatcccagggcacagcacaaaagtgagcttgtttctaatatgcacacctcgccaaccattaggattatcaccttcacacatggaaagagcccattgctgaggtcttgaatctcaaatgcaaacactgtccacagttggaattgtgactgtcatatatgagcctccagccacagttgagatggtgacacatttctaaactcagaacatagcagatgaggactactatccaaacccaaccaactggagagatgtttaccccaatacctgggcttagggccagaagtatggtcatgggtgcttacaaacatgattttagagtaaattgtgactctcatttatactggataaagccattgagtagtacagagagtgtactagccgggttgcattgagttgagatcgtgccactgcaccccagcccaggtggcagtctgagactccgtctcctcctgtgtgtatgtgtgtgtatatatatatatatatttttattttggatggagtatctctctgttgcccaggctggagtgcagtggcacgatctcagctcactgcaagctccacctcccaggtgcacgccattgttctgcctcagccactccagtagctggtactacaggtgcctgccaccacgcctggctaatttgatatatatatatatatatatcaaattttttttttttaagacagagtctcactgtcacccaggctggagtgcagtggcgtgatctcagctcactgcaacctccacctcctgggttcaagtgattctcctgcctcagcgtcctgagtagctgggattacaggcacgcaccaccatgcccagataacttttgtatttttagtagagatggagtttcaccatgttcaccaggatggtctcgatctcctgacctcatgatctgcccgcctcagtctcccaaagtgctgagattacaggcgtgagccaccacagccggcctggagatttttactgttgtatgaacacacatcaaatagcatacatcatcattttctcacataaacatagcctactcttgaagttctgactctcacacatagaggtagtcagaggtggaaaaattgactctcatatgtggattcagtttgcaggtgagttgatgacacttagagcaagattcagcacacctgtgagtctgtgacttcactaattagacaaagtccacaggaggagtataggctgtcaggtacaaatttagttcatcgttgaaattgtaactcctgttcttagacacaatatataggaagggttaacttcctattcctaaaaccagaacatgtgtgggattgttaatttcatccctgcaccttcctgcaggtttaattgtaacattttcagcacctgagtgatctgactcttgcctaagaccagcccacagatggaatagtgacatattgctgaaccctgaactgaaaggatgtgactctatttttctgtgttggtgctgctcacaggggacattgtgacatatcgctgggccttgcacttaggtgatgtgagtctcctcctttgccttggcactgcccacagaatgcattgtcacgtatctctgggccccacacccaggttatgtgactctcctgactgtcccctgaccacataagcaattatgacatattgctgggtccgactctctggtataactctactgccaacaaggagcattgtgacatatatttccactcatcatcaaagtgatgtgactctcttctcctgcctgttccctgctcacagtgggagttgtgacatatcacttggctccgtaccaaacaaatgtgattcttcttccatcatgagttctgctggcaagggagattgagacatattatggagctctacaccaatgtgacattactgttttgcctgggcctggacctcagaagccattgtgacatattactgggctcaacaaggtaacatgagtctcctgtatggaccctgacaacagagcattgtgacatctttaagagcatcaactatttgatgtgactctccttttacacaaggcttccctcatatgagagattgtgacataccttctggcccagaaatcagatgacatgtttcttctgcctgagctttgcttacagggagcattgtgacatatcactggtctcagcacccatgtgatatgactctactgtctgtgccctgatttcaggaggaaattgaacttatccctgactgagcacccaggttttaactcttctgcctggtgtctgctctcagagaagattgtgacatatccctggcctgttacccagatgatgtaactctcctgctcactccctatccacaggggagattgtgacatatacctttgttcagatcataggtgtgatgtttactctcatatcaaaaatcagccaataagagacaaactatctttcatatgtgggcttgggaaaatgagtaagattctggctctcccctttgtaggaaggtcagagagaattacactctcacatattgtatgaagccccgggtggtacagagagtgtcctaacaggttgcagaaaacatgagattgtttttgtgtatgcacactttgccagttgttaagattatcaccttcatccatggacagagcctactggtgtggtcttaaatcttacaggtggatgcagtgcagagttgaaattgtgactgttgtaagtgaacatcaggcaacagctgaggtggtgacttattaataagcctagcttataggtagatggcaactctcatatctggacccagccattacagaggtgttaactctcatatctgggcatagagccacaggtacgatcacgggtccatagcagcagaaaagtctcccagccacaaaagattgcgactctcacgtgtaccttataaattcctcaggtggtacagagagtgttctaactaggctcagtgtagagtttaggttttcacactcatgcacacccagccaacagtaaagattttcatcttttcacatgaacacagtccactggaggttctgaatctcatatgcagagacagtcacaagttggaaaatttactctcataagtgaattcagtccaaaggtaagttggtgactttcagaccaagattgaacacacctattagtctgtgattccactaaggtgacacagccagtaagagggattgagtctgtcattcagtgattcaattcattctaaaaattgtgacttgtgtgcttagatccaacatacaggaggtgttgactttcataccaagaactggggtatatacaggattgttaatgtcatccctggtctttcctgcaggtgtgattttggcacacacttctgcccagcaccttagtaatgtaattcttcagaattggcccagcctacaaataggattgtgccacactgctggacccagcgcctaagtgatgtaactctgttctgccttggtgctacttgaaaaagacattgtagtatatctcagagccttacacccaggtaatgtgagtctcctctcatgccttgctgctgcacacagaagcaggatatgcacaggattgttaatctcatcttggaccttcctgcacgtgtgactgtgacagatgcttctgtgtagaacctgagtgattttactctcctgtctggatttaacccacagatgaatcgtgacatatcgctggaccagaaactaggtgatgtgaccccattgtcttgcctctgtgctttccacatggggcatttggacatatcactgtgccttgcacccaggggatgggagttttctctcctgctttggtgccatccacagtgaacattgtgaaatattgctgccctcccccctagtttatgttactctcctgcctctgctttgctcacatgggtcattgtgacagtgtgacatactgctgggtctaaaactcaggtagtgtaactctcttgtttgggttctgcctgcaggagccattgtgacatatctctgtgctcatcacccaggtgatgtgactcccttttactgcctggtttcttctcacaaaacatcttgtgacatattgctaggccccatacctagctggtatgactcttttaggctccacctgctgcagagattgtaacaaactgctgggcccagcagcataatgatattactcttttgccttgggcctgccctcagaaagcactgtaacattcatgggcccaatgccgaggtgatgtgtgtcttcagcctggaccctgcccacagggggcattgtaacatatcacttggctcatcagatgtttgatgttatcccctcccctctcctaccctgtgtttgcctataagagacattgtcacaagtttctgggcccagcacctaggtgatatcttcctgggacctgccatatggggattgtgatatatcgcatggcccagtacttacttgatgtgactctcctctcatgcctgggccctgcttacaggtgtgattgtgacacatagcttggcctagcccctaggttatgttactctcctcttatccttcagttattttcacaaggggcattgtgacatattgctggactgggaacccaggtgatgtgactctcctctactgcctgaaatacaaccaaaaagaaagtttgatatattgcttggccaggatcctaggtgacgttattcttttctcctgcctaaaccctgcatacattatgtattttgacacatcgttgaggccaacacctaggtgatgtaactctcctgcatgggctttgcctacaggggtatgatgatgtatcttttcattcatcacccaggtggtatgactctccacttatgcctgggccttgatgaaacagaaattgcgacatatccctggacttggcacttaggtgatgtaactcacctttattgccagggcatggaatattatgagtattgtgacaaatctcttggcctgacacctaggggatgagagactcctgcctgggccctgcccacaggatgctttgtggcctgtcttctggttttattacctagaaagatgtagatgtgactttcctcttctgcctgcattcttcccacagagaagattgtgacatcactggacccagcaattagaaaatgtttctctcctgcctgagccttgcccacaagaacattgtgacatatccttgggctcagcacccaggtgatggaactctaccacctgtgccctgtctacttaggctattgtgaagtatagctggtttcaatacccaggtgatgtaactctcctgccaggccactgccttccagtgatattgtgacatgtctttgtgccaatcacccaggtgatgtgaatcttttcacctgcctggtccttgttcactaggggataataatacatattgctggtttcagcaccaagctgatgtgacttgtctcttcttcgtagattctatcccccaaaaaactgacatatcactaggcccatcagcaaagttattttgcctggtcctgcccttaaaagacattgtgacatattgcagtgaccagaaccaatgtaatttgtctcttgcctaaaccctgcctactgggggaattgtgatagatctcttggccaatcaactgtttgatgtgactttcctttgtgggttttttgttttgtttttgatggagtttcactcttgtttcccaggctggaatgcaatggcgcaatctcggctaaccgcaacctctgcctcccaggttcaagcgattctactgcctcagcctcccaagtagctgggattacaggcctgcaccaccacgcccagctaattttttgtatttttagtagagacagggtttcttcatgttggtcagactggtctcgaattcctgacctcaggttatctgcccacttcggccccccagagtactgggattacaggtgtgagccactgtgcctggtgactctgttttttaaccagggctttgccaatagtagagatcgtgacctatctctgggcctaacacctagatgttatgactttcctctcctgcctggtccatgcccacagaaaagagagtgacttaccgctaggctcaacacacaagtgatgcgattcttctgcatgatcccagcccacaccgcttactgtgacatctctagacccatcacctggatgatgtgactcttcttcttgggaactgtccataatgaggattgtgacacatcacttggcctagcacttatgtgataagactcttcatttgcctgggccgatcaatttgggcgactgtgtcatatagctttactcagcccctaggttactctcctgtttttcctgagtcctacccacagaggtcattgcaacatatttctgagcccctcatttaggtaatttgactgactctcctgcctgggccttctgctcagtgatttttgtgacactttttttttttttttttttttttgagacggagtctcgctctgtcgcccaggctggagtgcagtggcgcaatctctgctcactgcaagctccgcctcctgggctcatgccattctcctgcctcagcctcccaagtagctgggactacaggcgcccgccaccacacccggctaattttttgtatttttagtagaggcggggtttcactgtgttagccaggatggtctcgatctcctgacctcatgatccacccgcctcagcctcccaaagtgctgggattacaggcgtgagccactgcgcccggccatgacacattttttgactgagctcctaggtaataagactcttctccattgcttggactctgtcagagaaggtattgtgatgtatcactgggcctaacacctaggtgaagatactgtcttctcctgcctggacactccataaattgtatattttgatatgttgctggggttaacacatgggtgattcagctctctcacatggatcataagcatggggttattaggacatttatttttgctaatcacctaagtgatatgactcctccctgaaccctgtcagaaggaaagattgtgacttattactgaaaccagaacttaggtgatgcgactcttctgtctagcaaccacgtattttgggtattgggacatttcacatgtccaaacacctagaagaatgggagactttggcctcgtcctgtccacagggtttcttgtgacacatatctgtatccattacataaaagatgtgatgccttttctatctgcaccctgcccacaggaaagattgtgacatacttcaggccccagccaccaagtgatgtgtctcttctgaatgtgcataactttcaggagaaaattgtaacacgtcactggttgagaacccagatgatgtgactctcctgccttgtcacagtcctcagggaaaagaaattacatatcagtggcccagcatccaggtgacgtcgctctcctgcgtgatttctgccaagaagttcgttggtaacctacatctcagcccagctcacaggtctgatgataactaatacctcttaccggtcaatagaagagatactgtctctcacagctaggcttacaaaaaggagtaaaatcccaggtctcctctctgtatgaaggttatagagaattaccactctctcgtatattgtataaagcactcggatggtacagagcatgtcatcataggacccagcagacagatcatgtttcatgtaaacacaccctgccaatttttagaattgtcatcctcacacatggaaaagcccaccgatgaggccataattctcatgcacagatgcaggccacagttaaaactgtgactatcggccgggcgcggtggctcacacctgtaatcccagcactttgggaggctgaggtgggcggatcacaaggtcaggagatcgagaccatcctggctaacgtggtgaaaccccatctgtactaaaaatacaaaaaattagccaggcgaggtggtgggcgcctgtagtcccagccacttgggaggctgaggcaggagaatggcatgaacctgggggatggagtctgcagtgagctgagatcgtgccactgcactccagcctgggcaacagtgagactccgtctcaaacaaaacaaaacaaaacaaaaaacaaaactgactatcatttgtgaacatgtggccacatttgagatggtaactctataagatcatgggtccagagcagcacaacgttctcagagcaggttgcaactctcatgcacaccatatacagtcctcaagagagtgcccttacagggccaagcacacaggtgagattgtgaaacttatattcacacccagtcaatagcaaagattgtcatccacttaaatacagcctacttttgaggttctgaacctcacttttggagatagttgaattggaaaattgactctcatttgtggattttgtccacagttgggttagtgacttttttctttgagacagtctcgctctgtcacccaggctggagtgcagtggcatgatctcggctcactgcaacctccacctaccaggttcaagcgattctttcacctcagccttcagagtagctgggactaccggtgcatgccacaatgcctggctaatttttgcatttttactagagacagggtttcaccatgttggccagactggtctcgaactcctgacctcatgatctgcccacctcggcctcccaaagtgttgggattacaggtgtgaccgccatgcgtggcctcgggttagtgactctgtaaccaaaattcaacacacctttgtgactgtaacctcactaaggagaataatttatttatttattttgagatggagtttcgctcttcttacccagactagagtgcagtggtgtgatcttggctcactgcaacttctgcctcctgggttcaagtgattctcctgcctcagccttccgagtagctgggattacagatgcccaccaccacacaggctaattttttgtatttttagtagagatggggtttcaccatgttggtcaggctggtctcgaactcctgacctcaagtgatctgcccacctcggcctcccaaggtggtgggattacaggtgtaagccaccatgcccagcctaaggcacataatttgcaaaggaaattgaggctctcatgcacaaatccagtccaccattgagactgtaacccctgtacttagacccaacatacaggaggtgttgattctcatcccttgactcaggacatgtgtgtaattgttaatgtcatcacaagacctttctacaaatgtcttgtgacatacaccttggcccagcatctgagttatttgtctctttttcctgggcccagttcacagtgctgtatcactggacccagacccttggtaatgtgattctattctgccttgatacagcccacaagggtcattgtgacatatcacagggtgttgcacccaggtggtttgagtctcctcttctgccttggtgctacccacaggtgtattgtgacatattgctgggtctgtgttatgagaatcttttgcttttgccctaaacatataggccattgtaacattgctgagtccaacacccaggtgatgtaacgcttcatcctggacctgtctacagaggggattgtactgtatgtcttcaccaatcaccctggaaatgtgatttacttttcctgcctgttccctaatcacagggggtattgggacatactattgggtccagcacctagctgatgtgacatttttgtttttttaaggttctgcttagaaaagagattatgacatatgactgtccctaacactaaggtgatgtaacttcttttgttttggctctgcccttagaaggcattgagacatactgctgggcctagcactaagatgatgtgagtcctctgcctgaatcctgactacagggagcattgtgacatatttcttcacccattacaatctctcctatagaccaagctcaggtaaatgccctttatacctacgtgatgtgacattcctcttctgccggggccatgcccacagaatagagagtgacttattgctggggcaagcaaaacagtgatgtaattattttgcctggtccctgcacacaggagtcactgtgatatatgtttgggcctcccacctagataatgtgactcttttcttctggggtttgtccacagtgggaattgtgatatgccacgtgacatagctcctgtgtgatgtgactcctcttcattcttgacttcttccaactgggttgattggaatataaagctgagcccagcacctaggctatgtctctcctcttgtctatgagccctacccacaagagacattgtgacatgtctctaggcttctcacctaggtaatgtgacttgtttgcctaggccatcccctcaggggtattgtgaaatactgctggaccaagaacctaggtgatgtgactctctgctactgcttggggtgtgcttaaggggaaattgtgatgtgcatttaggtgcgtccatcacctacatggtgttactctcctctcctgcctgagatctgcatgcatcatgtatttcttttaattaattaattaattgttttgagatggagttttgctcttgttgcctaggttggagtgcaatggcaccatgtcagctcaccacaacctccacctctcaggttcaagcaattctcttggctcagccttctgagtagctggaattacaggcatgcaccaccactcccacctaattttgtatttttgatagagacggggcttctccatgttggtcaggctgttctcaaactcctgacctcaggtgatttgactgtcttagcctcccacagtgctgagcttataggcaggtgccaccacacctggctggaatcatttatttcaacatatctctgggtccaacaacatggtgatgcaactttcctgcatgggccctcccacagaaatactctaatacatcttttcattcattatcttggtgatgtgacttttctattctgcttgagcactgccaaaaaaaaaaaaaaaaagattgtgacagatttctggaccaagcacctaggtgatatgactttactcacttgcctgaaacctgcatattttggttattgtgacatatcactgaagcaaacacctaggggttggaaagtttctgcctgagcccttcccacagagagccttgggatgtatttttttaatccatcacctgggagatgaaaccctatacttctgcctgcattctgcccatagagaagattgtgacatattgctgggtcaagcaaccagctgttctgtctgtccttctggactttgcccacagtgagtcttgtgacatatatctgagcccagcatgcaggtgatcttactctttttcctgtgtcctgctttcaggagaggattgtaacatctctggttgagaaccctgtgatgtgactcttctgcctggtgcatgctctcggggaagattgtgacataaccctggcccagcacacagttgatgtgactcttgtgtttgttctctacccacaggtggaattgtgacatataacttgacaaagcacacagatgtaatgatgactctcatacctcaaagaagccagtaggagagataatgttgctcacagctacgcttaggaaaacaaagaatatcctggctcttctttctgtacaaatgtcatagagaattaccactctctcacatctgtaaagccctagtgtgttatagagaatgtcataacagggtccaccatgcagatgagattgcatttgtcctatgcacagcccaccaacctttagaattgtcaccctcacacatgggcagagcccactgggtgaggtcctgaatctcacatgaatgcactccacagttggaactttgactgtcatatgtgaacatctggccgcagttgagatggtgactcatttctaaacctagctcataggaaggtgaggactctattatctggactcagccaattagagagatgttgactctgggcttagaaccacagaaaaggttctggatttccttcttgtatgaaggtcacagaggatcaccactgttgcctattgtatgaagccctcaggtgacacagataatgtcgtaggagtacacagcacacaggtggatactgtctcttgcatgcacactcagacaacagtaaagactgtcattctcccacacaaacatatcccactgttgaggttctgaatctcaaatatggagtctgttgatagttgcagaattgagtctcatatatgggcctggtcaacaggtggactggtgactctgagaccaaatttcagcacacatatgaggctgtgactgcactgacggtctgcagaagaaattttggctctcttgcaaaaattctgtcagctattgagattgttactcatgtacttagacccaatatacaggaggtattgactcccatatctagaacgtggacacgtatggaatttctaatctcattcctggactttctttcagatgtgattgaatgtgtctgctaagcgttttagtgatttgacttttctgccttagcccagcccacagatgagattgtgacatatctcttgactctgcacctcaaaagaagtgactctttttccagccttggtgttgccctcaggtggcattgtgacatatggctgggctttccacttaggtgatgggaatctttttttcttgccttggtgctgtgcacaagttgcattgtgacatattgctaagatctgcactcaggttatgtgaatttgctttttttccctaagccctgaatattttgcaagttaggacatattactagccccaacacctataaaaagggaggcttctgcttgggccctttctacagggccttgtgacatatctctgcatcagtcacctaggagatgtgactctccatttttgcctacactctgcccacagaaaaattatcactaggcccaggtaccagacaatgtgtctttcttgcatggccttttaccatagaaagcattgttacctattgctgggctcagcacctaggtgatgtcattgctgcctgtcttgctttcaggagaaggttgtaacatattcctggctgagtattaaagtgatgtgacactcctgtctggtccctgccctcaggaaagattgtgatgtattcttggccaaaaacccaggtgatgttactctcctcctttctgcctgttcacaggtaggattgtaaaatatattttggtctagctcacaggtgcaatggtgactctcatacctcaaaccatctaataggagaggtgctgtcttttatagctaggcctagggtaatgattaagatcctcggtctccttttttgtacaaagtcataggaaattaccactttcttgtatactatacacatctcttgtggtacagtgagtgtcattccagggttcagcacacaggtgagattgtggttctcatgtgcacaccccaccaattgttagaattgtcaccataatacaatccacagttaaaattgtgactgtcatatgtgaacatccagccagagttggaatgatgatttatttctaaatccagtactttagcgggtgaaaattctatctggacccatgaaaaatttacctgggcttagggccagagtaaacacagtttacaggaggaatgaaggctctcatgtgccaatccagttcattggtgaaattgtcagtactgtacttagacccaacatagaaaatgtggtgattctcttacctagaactgggacctgtgcgggattgttaatttattactggaccttcctgcgggagtgattatcacatatgcctatgttcagcacctgagtgatatgattttgctgcctggtcccagtctgaagataagattgtgatttatcactggatccagcacctcggtgatttgactcttctttttttggggacccaacaaattttaagtattgtcaattttgggtgaatcctgcacccatgttatgtgactctcccaaatgtgccttacatgttgtgccatattggggctcaatatatcacattagacattgttacatattgctgggttaaacacccaggtgatgtaactttttttttctgggactgcgtgcaggggaccttgtgacataactcaatgtccatcaccatactgatgttactctcttctcctgcctggtctctgctcacagagaaattgtgacagattactggcctagcatctaggtgatgtgactctcctctttttttcaggctccgcatatttgggtattgtgacatattgctgaactcaacacctaagggatgagagtctcctacctgtgcccttcctataggggacattgtgacatgtctctgcattcctcacctaggagatgtgactctcatcttctgcttgcaccctgcctacatggaaagctgtggcatattgctgtggtcagcaaccagatgatgtgtttctcctgcctgggtcttaataaagacaggaaagatggttgacatattactgggcccagcatccaggtgatgtgggtctcatcttctgcctggtccctgcttacagagaaattgtagcatattgctacacccagcacctagcttatgtgactcttctcttcttttaggttttgccttcagatgacattgtgacatcgctgggccctgcattgacaatttgtgactcttctgcctgtgatttgcacacttgggccattgtgacatattactgggtgtgacactcaggggatgtaatttttatgcctgggccttgcctataggcggcattttgaaatgtctttgtggctgggtgtggtgactcatgcctgtaatcccagtactttgggaggctgagggaagtggatcacaaggtcaggagtacaagaccagcctgcttaatattgtgaaaccctgtctctactaaaaaaagaaaaatacgaaaagcagccagccatggtgactggtgcctgtagtcccagctactcaagaggctgaggcaggagaattggttgaattcgggaggtggaggttgcagtgagccaaaatcgtgccactgcactccagcctgggtgatagagtgagattccatctcaaaaaacaaaaacaaaacaaaaaaaagaatgaatgaatgtctttgcaccaatcccaaaggtgatgtgactctcttgtgttacctggtctctgctcacaggaagaatcgtgacctttcacagcatatggttgatttttttcttttatttcttactttttcctgcaggaaagatggtgaaatattaatgaactaagtaccaaagcgatattacttttttttcttggacctgcctacataatacgttgtgacatattgctgcgccctgcccatagatgatatgagttttctgcccatcaactattttatgtgactctcctcttttatcttcgttttgtccgtaggttagattgcaatatatctttgggcctgggtcatgctaacagaagcgacagtgatttattactgggcacagcccacagggttgtgatattcctgcttgactcctgcccaagtggtcattttgacatatctcttggccagtcgcctaaatgataggtctctccttatctttctgtacctgtccacagtaggaaatgtgacatatctctgggcccagcacctatgtgatgtgaccttcctgtcatgccaaggccttgcctactgtagtgattgtgccatatagctgggcccagctcctatgtatctgactctcattttcttcctgagccctatgaaaagatagcattataacatctttctgagcattttaccaaggtgatgtgacttttcttcctgggttgtcctctcagggcattgtgacatgttgctggatgcagcatttaggtgatgtgacttcctctactgcttggactctgaccaaaaagggattgtgatgtatcacttggcccagcacctatgtgatgggactcttttctcttgtctgggccctacaaacattttgcattgtgacatatagctgggtctgccacccagatgatgtgtcttctacgtaagccctgaccacaagagtattatgaaataccttttcattcatcacctaggtagtgatgtgactcttcgtcagcctctaccctgccataagggaattgtgatgtatcactggacccagcacctagatgatgtaactcgtattttgactggaccttgcatattttgcatattgttacatattattgggtctgacattacgggatgggaagctcctccctgggccctgcccacaggtggccttgtgacatgttttggatccatatcctatgaaatatgactgtcctcgcctacatgcttcatgcacaaagaaaagattgtaacatatcactgggatcagccaccaggtgtgtgtctcacctctcagggtgttgctcactgagagctttgtaacatatcactgggcccagcacccagaagatgtgacttgtggcctgtgctcatcttttcttttttttctttctttctttttttttttttgacagccaggttggagtgcagtgatgtgatcttggcttactgcaacctccgcctcttgggttctagtggttctcctgccttagcctcccaagtagctgggattacaggcatgcatcaccacactgggcttatttttgtatttttagtagaggtggggcttcaccatgctggccagtgtggtctcgaactcctgacctcagttgatccacttgccttggtctcccaaagggctgagataactggcatgagccactgcatccagtctgcctgccaccagcagccatcttatagaaatagattttaatgcatccctgaccaggtacctaggtgatgtgatatgactctcctgtctggttctttccttcaaaaaagattgtaacatctttagacaagccccaggtgatgtgactcttctgcttactctctactcactgatgtaattgtgacatatatcttgccccagcttgtagttgctatgatgattctcacaccttgaaccaggcaataaaagagttactctctctcctagctaggcttaggaaaacaagcacaatccttagtctcctctttttgccaaggtcctagagaattaccactctctcacatattgtataaagctctcgggtggcacagacagtgtcatcaaggaacaaaatcacagatgatattgtgttacttttttttttttttggagacagagtctcgctctgtcacccaggctggactgcagtggcacactctcggctaactgcagtctcagtctcctgagtagctgggactacaggcatgtaccaggaagccaaactattttttgtatttttagtacagatagggtttcactatgttgtccaggctggtctagaactcctgacctcaggtgatctgctggcctcaggcttggaaagtgctggtattacaggcatgagccactgcgcctgccccccagcttcttttttgtatgtatatatttatttattttttgagatgaagtattgctctgttgcccaggctggagtgcagtggcatgatctgggcccactgcaacctctacctcccgggttgaagcaattctctgtctcagtctcctgagtagctgggattacaggcgcccgccactgtgcccggctactttttgtatttttagtacagacggtgtttcaccacctttgtcaggctggcttggcacttctgacctcgtgatccacccgcctaggcttcccaaagtggtgggattacagacgtgagccgctggacccggcctgattttctcttgaacaataattttatgtattgttaatatacataaaatattttggttcacattttgaatacattgaaaaagaaagaaaaaagagaattttcccatgttctggggtgggcctggctcagttcagggaggaagtcctccctgaaaaggctgcaacttaggctgtctctcttgtgttaggctgatcacatcttctgtcactcagggccttgagaaggtggggtcttgaacgatatccagtcagcgacattggactggaaactgtccaatcacacacacaactggagcagacagagcgacttccaggttgtagttggggggactgtgtctctagctgcagatggagctccaggtgtcgtcttcactgctctgtgtcctctgacttagagtcccagcctgtgtggccctgtgacctgcaggtactggagatccacagcaaagacgccaggacccgctgaaagcctagaaatggtgagattgccagttccgacatctggagaggggcaagggctggttggaactggtgggaagcagctgtggtgggactcaggcctccccgcagtcagctccacaatctgcaccctgagttctccttgcccaggttggcatccgtcccctgcagccataagatggcagctaggctgacagccgggcccccgggcgtcctgtcttcccagtgcattggctgtgccatgtcctggagccctctctgggcagctctgcaccagtagcgccacatctctcccagattgtgcagggaccacgggagaatcatcagggcagaatcctgactcagggttattaaaaatgtatgggtgtcacaatgaaagtattaaataatttaatcaaagggtgattcaaaaattgtagagcacccagctatggttttaatttatggtctgtggaaggggcttctcgaactcctgacctcaggtgatccacccatctcggccccgtaagtgctgggattacaggcatgagtcactgcgccagccctagtttcttaatttttacacatcagggtggaaatatcttggttatgtaatcagagtttaattggcagtttatagttggttaagcctgaagcttgtttccggcaatgtagtaatttaccaaaaaatgctcttgagtttagattattttttagaagtacaaatccggggactagagccacctcagtctaattgcctgccacttaattattttcacactccaatggtgacggatttttccctgaatttttcacatgtgtgccaagcaggacctcaagtccacccctcatcccatattcctccagcctaactctggcttacagcaaaatactaaatttccagtttcgtctgatattcccaaatgccaatttcccctccctaattcactttatcaactatttgtccttgagtgtacatttttatattattttaatcttttcttttttttttttcttattgagatgaagggagacttgctctatctctgagactggagtgcagtggcatgatcttggctcactgcaacctccaccttctgggttcaagcaattatcctgcctcagtctcctgagtagctgagattataggtgcctgccaccacacctggctaatttttgggtttcaccatgtttgtcaggctggtctcgagctcctggcctcaggtgatccacccaccttggccttccaaaatgctgggattacaggcatgagccactgcgccctgccgactgattgtttactacatgatttttcatacaaataataaaataattgtctgaaaggaataaatgattttgcttttcttactgagatataaaatgtaagcaccttaaaagtttcttcccttatgtgaacactgtgtttgagtaatattgctgaatttttctaacacttagtttcacaaaccaagttaataactctgacatggaaattaaagcttaagcccagtgactccaagctgaggctaatattgagcctgcaaaaggaggttattaaggcccagttccttttggggaacctcccctgcaaatttcccaacctgattatccaagacatggaagaagcctctatactgagagaaactacagagccttggaatgctggggatccacaggcagatgcagataaggttaatataaaggagattgggagggtcttactgaagatggagttgttattgttttgaggcagtttctagacttttaaaaataaaacagatgtatataaaaaattgaatttcgaaggagtattgcaacaggagaaagtagcaactaagtttttttgtttttgtttttgtttttttttttgtgacagagtctagctctgtcacccaggcagcctcctgagtagctggaattacaggcgcgcaccaccaagcccggctaatttttgtatttttagtagagacgggctttcaccatgttgatcaggctagtctcagactcctgacctcgtgatctgcccgcctcggcctcccaaagtgctggaattacaggtgtgagccaccgcgccaggccaagagttttaaagattgcaaagattaggcagaaaagggctttgccttccagagaaaagcaaacaagattagaaaggaggttggaggggaatgtttaaattgagtgtaataaaatcagattttagattagagaatgttttacccggacgtcagtatgttcttaggagggacataaaatggggttgtatggtggctcagactgagggtaagctcaaagttcatatcctgtgggaagagaataaacctaagcttgattaagaagtattttatgttgactactgaagacaaagtcagcttgtttttcagtgagtaaaaagaaaaagtacaaagcgtttttctggctgtgtgataggtaagaaaacagcaccatttcagtcataatggaaagaggtggctttcttttttttttttttttttttcccttaaagtcttcctggagaacacaaaggatgagaattttattgatcacagctgtttctcacctttgtgcttcatcttttcccaccttttttcttggttcaatacatttatttcacttttttggggttatatctttttttttttttgagactgagttttgctcttgttttatttgtattttattgtattgtatttgtattttattttctttgtattttatattatgttatgtattttgtttggagacagggtctcagtctgttgcctaggctgaagtgcagtggcatgatcttggctcactgcagcctcaaccttccaggctcaagcaatcttctttttttttttcttttgagacagtctcacttttgttgcccagactggagtgcaatggcgtgattttggttcagtgcaacttcctcctccggagctcaggtgattcttctgtctcagcttcctgaatagctgctattacaggtgcccaccaccatcatgcccagctaatttttgtatttttagtagggacaggatttcaccatgttggccaggatggtcttgaattcctgacgtggtgatctgcctgcctcggcctcccaaagtgctggggttacaggtgtgagccatcccgccaggccaagcaatcctcttgtacctcagacttccaagtagctgggactacaggcatgcaccactaaacctagctaatttttcttttcgtatttttttagagatgggatttttccatattgctcagggtggtcttaaactcctgagctcaggcaatccacctgccttggcctctcaaagtgctgggattacaggcatgagccattgtgcctgatcataccgtattttctttattcagtctaccattgataggcattcaagttgattccatgtctttgttattgtgactagtgctgcagtgaacacgcttgtgcatgcatctttatgatagaataatttgtatttctttgggtatatacccaattatgaggttgcttggtgaaatggtaattctgtttttagttctgtgaggaattaccacactgctttttacaatggttgaattaatgtacactctttaacagcagtgtataagtattcccttttctctgcaaccctgacagcatctattttttaactttttaatagcccttctcactgatgtgagatggcatcttgtggtttttctttgcatttctctaatgattattgatgagcattttattacatgcttgttagccacgtttgtcttcttttgaaaagcatctttttcatgttttttgtctacttgttagtgaggtcttttttttcttgtaaacttgtttaagtttgttatagattctggatattacacctttgtcagaagcatagtttgcaaatatttcctattattctgtggttgtctgtttactgtgttgatagtttcctttgctgtgaagaagctctttagtttaattaggtccaatttgtcaatttttgcttttgttgcaatggcttttggtatcttcatcatgaaatctctgccagtttctatgtctagaatggtatttcctaaattatcttccagggtcttttataattttcaaataaatatttcagcctttaattaatgttgagttgatttttgtatatggtgtaataaagtttcagtcttctacatactgctagctagttattccaccaccatttattaaatagggaattctttccacatttctattgtcatctttgttgaagatcagatggtagtaggtatgtggcattatttctgggctccctattctgttgcattggtctatgagtttgtttctgtaccagttccatgttgctttgtttactgtagctctgtagtataatttgaagttaggtaatctaatgccttcagctttgttgtttttgcttatgattaccttggctattcggactcttttggttttatatgaattttacaatagttttttttttttttttagttaaagatattttggtcatctgattagaatagcattaaatctgtaaatattggggttagtatgaccatttttaggatattgatattttctacttatgagtgtaaagttgttttccatttgtttgtgccatttcttacttctttaagcgttgttttgtaattcttatcatagagatctttcaccttcctgattagctgtattcctagatattttgttctttttgcagcaattgttaatggtattgtgtttataatttgtatttggcatggatgttgctgatttacagggatgatactaatttttgtacatttattttgtatccttaatgatactgaagttgtctgtaagtttaaagagtttttccaccaagactatacagttttccagacatagagttatgttgtctgcaaaaagggatagcttgacttcctctctgtttaagttcctttttttgttgtcttttgcctgattgctctgaccaggacttcctattttatgttgaatagaagtgttgagagaaggcatctttgccttgtgccaatttttgaggatgaatgcttcaagcttgtttttttcctttatttttgagatagagtctccctttgtctcccaggctggattgcagtggcacaatcttggctcactgcagactctgccttctggtttatgcaattctctttccacagcctgtaaagtaattgggattacaggcacccctggctaatttttgcatttttagtagagatgggattttgccatgtcagccaggttgatctcaaactcctgacctcgggtgatccgcctgccttggcctcccaaagtgctggaattacaggcatgagccactgcacccatctgcttccaggttttgtccattcagtatgttggctgagagtttgtcataaataacttattattgtaaagtatgtacttttaatgcctaggtttttgagtttttaacataaaagatgttatattttatcaaaagccttttcagcatctattgaggtaatcttgtggtttctgtctttagttctgtttatgtgatgaatcacatttattgatttgatttgtgtatgttgaaccaaccttgcattcccaaaataaattctacttgatcatcgtgggttagcttttttgatatgctgctaaatttggtttgtcagtattttgttgaggatttttgcatgaatgttgaaagatattggcctgatttttttttttttaatctcagccaggtttcagtatcagaataatgctgttcttatataataagttggagaaaagttactttttcttaatttcttaaaatagtttcagtagaaataataccagcacttttttgtacacagctgtgaatctgtctggtccttggctttatttggttggttggctctttattactaattcaatttttgagcttcttactcatctatttagggctttgatttcttttttgttcattcttggaaggatgtatttgttcaataatattttcattttttttagattttcttgtttgtgtgcacagaggtattaatagtagacttaaatatatttttgtggggtcaatagtaatgtctcctgttatttctaattgtgtttatttggatcatcccttcttccttcattaatctagctagtggtttatttatcttattttttttttcatagacttaattcctggatttcttgatactgattttggttatttcttgtctgctgctagcttagggattgatttgctcttgcttctttcattcttttatttatgatgtcaggttgtcaaatgaagatctttcaaacttttttagcattaaatgctataaatttcccttttaacactactttagcagtattgcagatattctgatgtgttggttttttatttttatttatatttatttatttatttattttgagatggattttcgctcttgctgcccaggccaagtgcaatggcacgatctcaactcactgcaaccactgccttccaggttcaagcgactctctggcctcagcctcccaagtagctaggattataggcatgtgccaccatgatgggctaatttttgtatttttagtagagatggggtttcaccatcttggccaggctggtctcaaactcctgacctcatgatctgcctgcctcggcctcccaaagtgctgggattacaggcatgagccaccatgcccagccctggcctgtttttttgttcttatttgtttaaaagaacttcttggtttttgccttaatttcattatttatcaagaagttattcaagtgccggttgtttaatttttatgtaattgtatggtttcaagttgttttctttttgttgaattatatttttgtcaagctgaagagttctgtagatgtctattaggactatttggtcaagtgttgagtttaggttctaatgttttgttaattttcttcttcagttatctgtctattagtgcctgtgggatgttgtagtctcccactattgttgtgtcagaatctaaatctcttcataggtctctaagaacttgctttattcatatgaacccatgaattttatataacacctttctcttttctgctttttcttccgtaaacattctttcctgtgtgcacaatgtgcaaaatgtagatgtccatgagttcaagaacatgtttagagacctagctgttgtaaaagaaaatataaattagaaataagaggcttaattagtccacataaaaataagagaaaatatcttactaaaatctcttttcttaaaacacttagattatgtgtagatttttatctcctttttttgaaatatatgtaaatcattaacagctaaataaatctttgttatgtatttattttttttttactcacgattgtctttatctgggacctgagattaattgctttgtttctgctttggcaaaaggttattcttattatttttagtcttttaaagttgacacagatttgttcacagtaaaactcattccaagagcacacaaaagtttagcataaaaataggattaaatttagcaaaacagaattataaggactaaaagatattggtaatttgattgacagaaacctgtttatccaacatgattatttacaggctgaagtacttacactacaaaagcaaaaatagtacagtttataaactgaacagtggagtatattgtcataccttggtttctatttattacttcagtacaattagcatagttatgtgtggtgttgttagacaacctgcattcatatacatttaatagtattttctacaatagtatgaatataaagccacaatgtctactttgaatgaattccttaattcttttattattgtgattcatacttttgaaatgtaaagtttttcaattgaaatacagttacagaaattttttaaaaaatcctacatacattatgactagtatgttaaaattattcctacttacatatttatatctaatatccaaagaaattttactaccacattgttacagtagatattagtctgctatgcttattaatttaaccaatagagataattataagtaagcataatttcaatgtctttcatttcacaaattggaatgctgctattgtaggacaaataaagacagatgatgtggccacccaaaaactgtagtagctctccagttagctaccttgcaggttcatgtatattccactatattaacacagtcagattttaattttttatcaaagtgctggtggaagttgtcagatatatttgaatatagattctgcattcaaaggctagaaaattagagagcagcagagatagaaaaaatattttatgattctgctgataatatacctcttttcttcataatactcatgtttctcatgctgagagtagctatgcactttgggtatttagagagaaattgtttttgcaggaatattttctggctgacttgatcaatcttatatctaatttcagttttttcttaagatgcttttaacttcttttttttctctcaatataatctttctcagagtgagagctgtttttctgtagaatgctttgtgtatctgttttagaagccctattagtatcccataatgtctgtgaaagacgtggctgtcacagtgagaactcttggagctatctctatctggatgcatgctggaaatctagcagtatattttccatgtcaccattataaatagaaactgtggcttaaataatgctctcatttccgttattgtgaaggtgcagttctacccagggaggctctcttcctgcagctcaggcttcactctttgatgtgacactaaagtgctgctatggcaattggcgttcacctatgatgtgagctgccagctgtgagccctgtgctgtggtccataccgcagtggcagatggtaggaaacaaaagaggacactggccaccagaagaggggaagccggagtactgtaaccccgtcctcagggaggagagaggtactgctttaaaatgcaagtagccaaaaagatagcaccctattcaaccacttttgtagaagagtgaaagtctgccttcagcaggcagctggcttcaagttgcagaactatcttgtcaggaagatgtgaaaaggttattttgtcattgaatataaccaattagcatatatggatgacctccccaatgtccaggtgaatttaggatgaactatgtatgacatggtgctgtgaattcttctacttgtgaactatttatggtaaccatctttatgtcttttcgatctcttaagcagactgactgtaatacatttgacattcagatttaattgtgtaatgaaagagttttctttttctttttttttttttttttttgagacagagtctcgctgtatttcccaggctggagtgcagtggtgtgatctcagctctttgcaacctctgcctgtcaggttcaagtgattctcctgcctcagcctcccaagtagctgggattacaggcacatgccactatgcccgtcttttttattttattttatttttttttattttagtagagatggggtttcaccgtgttagccaggatggtctctatctcctgatttcatgatcgacccgccttggcctcccaaagctgggattactggtgtaagccagcatgcccaacctctttcttttctattattgtggtttctctggggctgaagagaatttttttaaaattatatttcctagaattaccggacataatataaacaaataaggtgccaaccaagctttactctagaggggactttccctctcaggcttctagccaactcacagttatgctgtaaagtgcatactgtcacctaaatatgcaggcagaattgtgtctctgcctatttggtatctatagtcctccacagtcacttctagaggggctagagcagatttctacaaactttttttttttttcttagatggaatttcactcttgttgcccaggctggagtacagtggcacaatctcagctcactgcagcctccacctcctgggtttaagtgattctcctgcctcagtgtcccgagtagctgggattacaggcatgcaccaccaagcctggctaattttgtattttcagtagagacagggtttttccatattggtcaggctggtcttgaactcctgacctcaggtgatccacccaccttagcccccaaagtgctgggattacaggtgtgaggcacctcacctggcctagatttctacaaacttaatagggcagatattaaccattttacttctttcaatgactcttgtatcttcagacctgaaactgattcagagaccatggagcccagaaacccaatcagtgtaacaagtgtgcattgagtagacatggagacatgagaatctccacttctctttttctcctcttgctaaaatgctcacaattgcaggtaacacctgctgctactccacccatccaggacctaaatctgcagctccaaattctaaatctaggtctagaaattaaaaaacaaaacaaaacaaaagtttcatttgagaaatgcaagtctttttttttttaggggagggttgggggggatggagtcttgctctgtcaccaggctggagtgcagtggcgtgatctcggctcactgcaacctcttcctcccaggtcaagctattctcctgcctcagcctcccgagtagcttggattacaggcatgtgccatcacacctggctaattttgtattacttttttcagcagacatgggcttcaccatgttggccagtatggtctcgatctcttgacttcgtgatccacttgcgtcggcctcccaaaatgttgggattacaggcgtgagccactgtggctgtctgccagtctttttacttataaaactcagacattaaaataagagcacaattatgtctttctccctactttcaactatatattgatctcttgaagctgttcactattgccaaaagtaggtataagttaaaccaataataagttatttatttaaacaaataagaatttctcacaaactagtttgtatcaccccactctctatctctcttctttttttcccttcacaaatccacttgtaattgctgctaatcagtatagattccaggcatcttgaatatttcttctcaagttacaatgcttaagcttggccccaataaactgtgtacttatattcatgttgtgtcagcttttttttaggtaaaatattatttagaattttctagagcagtctctgtgagtagatttctcctttgattgtactcgctgtaacagccaaaaatgcaaagtgatgttgattttatctagaatctgcacataaggtctggtctctgcctggaatttacaagacagggccagactttagattgagaatgtacagaaaaccaacaggaggcattttctgcattgtgagatgtccacatagacacttcagatccctcctttgagagtgtgactctttgaccttttcacattgctacctttctgtgagaggctacaggtttaaatagaatctgatggcagaatctctaagtgtaaacaagcatcttaggagtgagagatcaaggccacaaagtagccagagccctgagcacaactatagctacctggaaaatgtgatactagagtgttattgtccaaaagctagctaatcaggacaggagatccaggttctggagctccaccaggatagtttcattttctttttagaatcagcctgagtctctcctgctggcttattattggtccatcagcccagggtcactggaaatgctctcacaatcacccaggcatctgagacatttgagaatctccagaacaattgtgtcaggctgacaagagtggttaattttgcttctgtcttactgtaaaagaaatgaatcatctggtgtgtgttcctcccatcatacaagagatgtctttggttggtacccagatgagagtttctctggttccctggtacttgagtgaaaaacaaggaggaggtctggagactcaaacagataaattgattccatttcatatagtcattagaaaaatagatgaagcagtcatggtccctaccatgcaagaacttttagtcttgactatcaactggataaatgatttaattatgcatcatatggtgggtacaataaatagacatgtgcaaaaatatgggatatatttgcaccattttctttatattgttaagacttctgatgtctacacctgaacatatatttataaacaagagttattatttgcattttttagcttgctaagaacacttatttatcttctaaaaaactattttagaaaaccttaagagatttgttaaattgcttattagtatgtgatataaccttgagaggggagtggggtttaaaaagattaaaaattatacaaactctgagatttaattttttttttttttggtacacttaaaaaatgaaacagaactgaaaatactccccagtggcacaaaaaacagaattttacattagctctacaccctgtcccaaccctgatcagattcaccctttttgaagaccttatttaggtgtggccatactctggagtcttgtctcacagaactaactagaagagatcagagttttgggtgatgcatcctgttgcttttttagggttggtgctcatgattttctgaaacccaaaagcagataaatggaaaatataaaatatgatttatagggtcttaattaaaaaaattttttttaaaaccattgtttgcagagacattacatttagcaacttgttttctctccctgcagatatagttgttgattcacaaatcacaaaatagtaaatataaacacaacaaaaattcatctaaattatatgaaactctatctgtatccctctcatctgtctatatttatattctatacattttttaaaaaaaatcagtgacagccgggcgcggtggctcacgcctgtaatcccagcactttgggaggccgaggcgggcggatcacgaggtcaggagatcgagaccatcctggctaacacggtgaaaccccgtctctactaaaaatacaaaaaaattagccgggcgtggtggcgggcgcctgtagtcccagctactcgggaggctgaggcaggagaatggcgtgaacccgggaggcggagcttgcagtgagccgagatcgcgccactgcactccagcctgggcaacagagcgagactccgtctcaaaaaaaaaaaaaaaaaaaaaaaaaaaaaaatcagtgacagataaacagaagaagaaataaaaatgctgggttcttattctaaatccttggaattattgaacacagtataaactcacagggttttatcagaattaaataatgggtcatcacagtgctctgtaacgtcttattgagaacacagtacctgcttaataaacattgcattagtacatgtgtacatgttgttttctaaatgcagacttactcagaaattgctgctttctgttttctctgtaaactttaaagagccaggaaataatatgatactttaagataaagaatggttgtcttcatttgtatcaaaagtatttgtgttgtgacaagactgctgaatataagggactctgtcctgtgcctcatttttctttttcttttttttctttttggagacgagtcttgctctgtcgcccaggctggagtgcggtggcgccatttcggctcactgcaagctccgcctcctgggttcacggcattctcctgcctcagcctcctgagtagctgggactacaggcaaccgccaccacacccggctaatttttgtatttttagtagagatggggtttcaccgtgttagccaggatggtctcgatctcctgacctcgtgatccacctgtctcggcctcccaaagtgctgtgattacaggcgtgagccaccgcgtccggcctgtgcctcatttttctaaacagtgctaataatgagcccagagagagcgacatcagcactgacaggggacttctttaaaacacccatttatggaccctttccaaacccacagaatcgtattacatagagtggggccaaatttacgaagtgatttataagctcattaaagcttgagtagcaatgcttaggtaagtggttataagcccagacttctaattagaatcacatggccaatttgcagaactctcttgtgcccttttcacagtttgcttaatgttctgggtgaaagcatctatttgttttaattaagtgtctcatgtgactctaatttgccagaatcaagtatgacgagttcaagatacatttatgagagttaagtgccgcctttgcactaaagaggggtccaggaacctgttctgtttgggtttgttaaggacaggacagtgtggccaatatttctattactgtagcagaaattgctagtgtctgtagcagaggagagaacctgaggaccaaaaaaataaaaagcacacacacacacacacacacacacacacacacacacacacactttttttctttttttttaagatggagtttcactcttgttgcccaggctggagtgcaatggtgcaatctcggctcactgcaacctccacctcccgcgttcaagcgattctcctcccccagcctcctgagtagctgggattacaggcatgtgccaccacgccctgctaattttctatttttagtagagatggggtttcttcatgttggtcaggctggtctcgaactccctacctcaagtgatccacccacctcagcctcccaaagtgcaggattacaggcatgagccaccttgcccagctgcagagaaacttatagttcctaaatcatttctgttataaaggacagaaatgggtagagtttttctgtcttgggctttctgcctttaggtgtggtggtaagagatgaacatgtggtgctcaaagtttttaaggcatattctcaagatgcaggtataattagtccagaaaatgtcatctgagaaataattctagaggaggaggagaaagagaaaaaatgactttttttcagctaaacatttctgacatcaagagctgtgtccgctgtgcctcctggattgccatgtgcttagtatgtgcaaatctttacttctaaacttgtgttttttctccctaatgagtttttcttaactacttttataaatgcttgtgatagtcaagggtctctgaaaaatatttcgtttctatatatcacagacttctctacatcacgacttcttatatgccgtgcagaattctcaccatgaattcgtgatctgcaatattaaaaatgttgtctttggctgttgaacatggataggtgtggattatctatctgtctgtctatctatctatctatctatctatctatctatccttctttctttctttttttttttttttgagacggaacctcactctgtcgtccccgctggagtgaagtggcatgatctcggctcactgcagcctccacatcccgggttcaagcaattctcctgcctcagcttcctgagtagctgggattacaagcatgcatcatcacactcagctaatttttgtatttttagtagagacggggttttaccatgttggtcaggctggtctcaaactcctgaccacatgatccacccgcctcagcctcccaaagtgctgggattataggcatgagccacagcatccagcaatgatactctagatttctatggggaaaacctgggattcttagtaaagatggagaacatgtaatgttgaggttccttctgtgttcttaatggcattacaccattaagaaaatgctcatttaaacagaatggcatttattacccaaaaagttctgagaaaagtggctgggtgatgtggcttatgcctgtaatcccaaaactttgggagactgaggtggatggatcatgaagacaggagattgagaccatcctggctaccacggtgaaaccccatccctacaaaaaatacaaaaaattagccaggcatggtggcacgtgctagtagtcccagctactagggaagctgaggcaggaaaatcacttgaaccttgaaggcagaggttgcagtgagccaagatcgcaccattgcactccaacctgggtgacagagcgagactgagtctcaaaaaaaaaaaaaaaaaaaaaaaattaccaggagatacctgcttatttgggtgctaaagagagactacttaaagtcactattaaaaattgtagaacatggaaaatatctctatcttggactttccatataaccgatgttttcttatggttaaattgagactgtaatttactttagtggggggccatatctcagtagtgatgctgtgtccttctgggtgcatcagcacactatgaaaacttgttcgagtgcatttgatgttaataactcacttgcttaataaactctcttacagatttttgcactatagaggttttttttcctcttcatcattaagtatctttatgcagctgatgtccatacaccatcacatttaatctggcagctgccctgtttttgaggttttctttgtatttatctttctttggtaaatgaaagctctcatctttgtttacaggccagaaaaactgaaaaagacacaggctcttccacttactggatgtttgacaaaatgatattttggggccaaaacattggcattactggtaaacttggtagagattcagtaactcagactttatttcagatctcctgaaaaaataatctgcattaacatgatgtccagtttattgtacacattaaaatttgagtggtaccttctaagtcaacatgtctattttgtctgaaaaatgtaaagaactatgtctttttcatctgaaaaacatatataactcattctgtattatgtaaatatagtactcaaaaatgtgcatgttagtgtctatgccctcaattttatactttatcatccagacaagtatcatatatacactgatgttgtggatattatgccactctcttttctcagagttagagaatacattagaaaaggtttgtgtgttgacaattattttattggataatttcagtcactcttataagtcagaaccagttttttttactctctcattttgccttgagtcaaatggaaaattctgccaatggccactttgtacatatgtgtgtttgtgtgtcttttccagggactcttgacgtttaggtatgtggccatagaattctctctggaggagtagcagtgcctggacactgcacagcagaatttatagaggaatgttatgaaaacctggccttcctgggtgaggataactttaatacaaaattccttatataaactaaaggtttcatttctcttttgtagaatgttttctggtaatttatgctttcaaatttctgttttcaagaaaatcctggggatttgtctgtttagaaaagaatttcttcaagatatttcatcttgacctgaactttccacattcctgagcggatctgtgtccttcactttagattattggtaatttcagaagtttagttgcataaaatattgttactcacaccttaaaatctaattatcatcaccagtttttgattcagtagtaccaggcagtgaaattaagaacctacaaaattaattttttttttttttggagatggagtcttgctctgtcacccaggctagagtacagtggcatgatctcggctcactgcaacttccgcctcccaggttcaagcgattctgcctcagcctactaagtagctgggattacaggcacccgccaccatgcccagctaatttttgtatttttagtagagacagggtttcaccatcttgggcaggctggtctcaaactcccgacctcgtgatcccagcctcccaaattgctgagattacaggcgtgagccactgcgcctgaccaataaaagtattttctaaatagttaaacatttctgttataaattagtatattgggataaatttattagaatattctattatatcctctttactgaacacattactaagttggtaattggagaatatgagcaagattcatgttagttatttttaataaaacaggtattactgtctctaagccagacctgatcacctatctggagcgagaaaaagagccctggaatatgaagtgacatgagatggtggatgaacccccaggtaggttagagtgaatacaacagacaacatggatgagaggcccaaatcaagaagaaagcaagtctttaaagtgatttgggaagctgtgttcaaaaggaaatagtttctggaaagcctgaaatttttaaaaattatactctcacgtaggggcatcttatgtcttatgtttataaaatttctaagaattctaatttcccttcagtgttcttccttcaaatttacagtgacagctaaagtactattcatgacatacaaaaagagtgcacaatctgacttttttcttgtttttgtggacagagagatatctccataattttgagatactctatgttaaactattttttaagttctctttttacatcacgtctgaaatgcacgagagtgacggtttctgtttcactggttttcttgttcattttttctgcacatttcatcctgttttcattaccatagttttgaaatatagtttgaaattataaagtatgatgtccttctgctttgttcttttttcttaagattgctttggctattcaaagtttattgtagtttcatctatgttttagggttgtgtttttcattactgtgaaaaaaaaacactggaattttgacagggagtttattgaatctagagatcactttggataatatggcagtttcacaatacttattctttcagtagaaataaaatatttttaaatttatttgtgtcctctaatttttttcattgatatatctttcacttaaaagatttacaagctccttgtttaaatttgttctaaaattaattatttcattgctattgtaaataagattttttttctctcttttatcagaccgtttgttttaagtgtatggaaccataacttatacttgtatgttaattttatatttttagtttaaacaagttttaatgtactgtttatgttttttttttatatataagattacatggtctaccaacagcaatgttttacttttggtcttcaatttcaatgactttaaatttttcttttgactatttcttcatccacatactttcagtgctatgttaaaatagaagcattgacaataagaaacaattgttttgcaatggggtctgtaaatttaaaggagcaaacacctcttcaagattttataaactggtttcagagagcaaaaataaatttttgtttggcccccccaatgtgatagaatgccctctgggtttgtggtgaagaagggttgtagcttggtcttaaggctgctgggtttgcacaagggttcacctttagttgtcttgttaaaaggggcttggataggctgggtgcggtggctcatgcctgtaatcccagcactgtgggaggccgaggcgggtggatcacgaggtcaggagatcaagaccatcctggctaactcggtgaaaccccgtctctactaaaaatacaaaaaaattagccgggcgtggtggcaggcgcctgtagtcccagctactcgggaggctgaggcaggagaatggcgtgaacctgggaggcagagcttgcagtgaaccgagatcgtgccactgcactccagcctgggtgacagagcgagactccctctccaaaaaaaaaaaaaaaaaaaaaaaaaagggaaaagggcttggatagttgtagttttcattttcatttaatttttggacagagtgaatatctttcaggactttgctgtgtattgcagacccaggggcaggtttctgcagtcgggtctgcatatggtgttctttatatcaggatgtgatgagagtggctttcactgagtacaagagagaattttcccaggtcactttgggtttctacataggcagaaccggccatgaactgtggctcagggagctggaaatgagtcatggaactgcctcagggaccacagtaaaggccaaggtctgcaggcctctcagcatagctataaatgggtgtcttcctctaggcctctggaagagcaggacctcccccagactgtgactgggaagagtttgggatggttacagagtaagttcagaattctcactggaaccaagttaggtggaacgttttcttgtctgtagccaacaacagtagtcctgtagtttgccacctgaatgagggcctgccttctaaacagaattatcttcaatattgggctttagcagagtttcacaactcccttcctggatctcagaactctcttaaaggcacttttttttttttttttttgagacggagtcttgctctgtcacacagactggagtgcagtggcgaatgcagtggcacgatcttgactcactgcaacctccggctcccaggttcaagtgattctcctgcctcagcctcccgagtagctgggattacaggtgcccgccaccacccagctaaattttgtgtttttagtagagattgggtttcaccaggttggctaggctggtcttgaacttttgacctcaggtgatccacccacctcagactcccaaattgttgggattacaggtgtaagccaatgtgcctggccaaaggcacttatttttgagatggggtcttgttacataacccaggcaagttttagtattttgactgtaagcaattctttaatgtatcatgtagctgtcattactggtgtaaaccatgatgcgtgattctcttaaaaaggcattttcatcaggaatgactgacaaattttcttgctgtcaggggataagcaaataggatgccttttttttttttatcttgttaatgtcactctccatataaatttttactttattttctactttaaatttgtctgcaattttagattcagacatttagggcaatatactagaatttacgtgttgtgcctgaattaaattaggtaattagtatgcaggcaggcaaaaaggaattataaaattttcaaccacttttgtcagcctatatctaaataataacatagtttatttcccaaatatttgttttatatatgaggctctaaccatattctgctaaatatatgtataatttagcaatgtaaggtattatttgcttctatatttggattagttttattttgttcaaaaatagcaaacatttaaaacaaaaaattgtcagtagtttcttttaaaagcttatccattaaaggtttctcattagcatctcctgtttatgattgtatttccttttctctgaaattttattgccatacaatagatatcagtaatttaaaatgcctgccttccgggaatgcacagttacagtcaaacattgcagttatctagacaaattatttgttaatgtacattgatgttgccaactagattttatgagtaaacatttattattgtcttgtagttctatattgtggttttttactataaatttcttaatatcagtttattgtgtttttggttttacttatgtattataattttagataattggcaattctgtttgtatactttaagttaatgtggggtttaattaaaagataaatgggccatatgtctatcacaatcagatatgtgtgtgtttatatctgcaaatgtgaccccaatttttgttgtagcttatcttgtatatattctttcttagctcattctctttttctctttttttttttttgtttatgtttttgagacggggttttgctcttgttgctgaggctggagtgtaatgcagtatctcggctcactgcaacctctgcctccagggttcaagcaattctcctgcctcagcctcccaagtagctgggattacaggcatgtgccaccaggcctggcaaattttgtatttttctttattagagacggggtttctccatgttggttaggctggtctcggattcctgacctcaggtgatctgcccacctcagcatctcaaagtgctgggattgcaggcattagccactgggcccgacctcttagctcattttcaatgttggttttatcttgtctaagtgagtagccttggaaatagtctcattttcgtcatgtgtttaatgatgaatatgtatttcctttgtgtgagacaaacactttgtgatttggaggtaatttttaaaaagatttataatttggtatttttttcagttttttaaaaagtaactgtaaaaacatgtaacatgtaatttagtttcttaaatctatttaaatatacatgtcacagccaggcatagtggtggctcacatctgtaaaaccaggattttgagaggccaggacagaaggattgcttgagcccaaaagattgagaccagcctgggcaaaatgtggagacaccctctctacaaacattttttttctaagaaatagccaggcagggttgtgtgtacctgtggtctcagctacttgagagaatgaggggcagggttacttgagcctgggactgtgaggctgcagtgagccataattgtgccacgcactcaagcttgggtgacagattgagaccctgtctcaaaaaaaaaaaaaaaaagttgtgtatttcaggtatgttaactatattcacattgttatgcaaaagacttctagaaattttatatcttgtaaaactaagactcaatatccattaaataacatttactcattttatgctctctccatcccttaacaaacacccttccactttctgtttttatgagtgtgactattttatatatcttacgtaagtgaaatcataatatctatgattttactactggctgatttcagttgacataatattttcaaagtgtatctttaaatgtgtcaagatttttaagattttttttaaggctgaataatattccattgtatcaaatatgtcttgaaggtcctatattgcatattttagatatagattaataaatggaattgctgtatttgataataattttatttttaattataagaagtacatttataacataaaataatggatgcctgcttgttttctactgacaatcaacacgggtttcttttttttttgagacagagtctcactctgttgcccaggctggagtgcagtggcatgatctcagctcactgcaacctctgcctcccaggttcaagcgattctcctgcctcagcctcctgagtagctgggattacaggcacgtgccaccacacccggctaatttttgtatttttagtagagatggggtttcaccatgttagtcaatctggtctggaactcctgaccttgtgatctgctcacctcggcctcccaacatgctgggattacaggcgtgagccaccgtgccagccagtccaacatgatgaaaccccatctctactaaaaatataaaaattggccaggcattgtggcaggcgcctgtaatcccagcttcttgggaagatgaggcaggagaattggttgaacctggaaggcggaggttgcagcaagctgagaccatgccactgcattccagcctgggcaacagagcaagactccatttcaaaataaaaaaaaaaaaaagaagttatcttctatgtctaattaaaagatttttcacttatagtttcaggaaataatcgaacttaattttatcagtattgatattcagtatggataattcagtatggatattcagttttaaaattatcttttttctattgtgtgctcatgtcaattttgtgggagattatttggccatattcagaagggttatttctgggctctctgttctttcatctgtttatctgtctttttgtcagtaccacattgtgtttgttattgctgcttttaatatgtttcaaaatcagaaattataatgcacctttgttctttttcatgggtgtttggctagaggtcataataaaattttaacattttaaacaatatttctttaaaaaactgctgttgggatttttatgaagattatattgaatttgtctaccactgtaagttgtattgacatctttgaaaaactattattttttgattcctgagcaaacatatgttgaagagtgtgttttattttcttatatttttggattttttttagttttaatttatagcttaattcagttttggtcagaaaacacagtgtataattttggtcttcttaaatatatttgttgttgttgttgtgtttgttgtttttgtttggagacaggatcttactctgtcaaccaggctggagtgtactgccatgattttgcctcactgcagcctcaacctaccaggttcaagtgatctttcctcctcagtgtctcatgtagttgggactacaaacataaagtaccatgtctgaataattctttgattatttgtagggatagagtctcactatgttgcccaggctggcctcaaacttttaactccaagtgatcctcctaccttgatctctaagtgttgggattataggcgtgagctacaccacccagctggcattcttaaatttaataaaacttagtatgtgtcctaacagaatacaccagatgcaaataagaatattgtatattctcttgcttttgactggaaagttttgtactcatgtgttaaacctagttggtctgtaacatggttttgatgttcatgttctccaaaccttattctgcagtgtaatccttaatgttggatgtgagacctggtgggaggtgtttgggtcatgggagcaaagtcttcataaatagctggtaatcaaaatgtttacactccattaattcaaatgtaagcaggtttattagaagaacctggctccttcacctcatacttgctctgtctgttattatgtgacatgtacagttactcttcgccttcaaccatgattgtaagcttgctgagacactcaccagaagcagatgctggcacacactttttgtacagtctgctggattgtgagccatataatctttatttctttataaattatccactcaggtattcctctatatgcaaaatgattaatacggtctgcaatgtcgtctaggctttgttttcttgttgattttttaatctgaattttctatttattattaaaaatggggtattgatgtctacaattatattctatgtatttcttgctttacttttgtcaatatttgctttatatattttggagaccttatgttatatatacatatacatacagataggtagatggatataatcattatagatttgtggtaaatcaacctattttatgagtatgtaatatcagtgtttgtctcatgttagcacttgacttaaaacatatctaatacacaattgtagttactattttcataaaatgtagttgttttttttttcgctctgtggttttcagcctatttgacttagtgctgaaatgattcccttgtaggcaacatactgtttgcttttttcttaagctagtaaagcattttattttttctttttataatttcatttatttacttgtttattcatttatttttgagatagggtctcactctgtcaaccaggctagtttgcagtgttgtgatcatggctcactgcagcctcaacttacaaactcagaagattctctcatttcagcctcttaggtagctgggttacaagtgtgtagcatcacgcctagccagttttttgtgtatttttggttgagacagagttttgccacactgtcaaggctgttctcaatcttctgagatccagtgatcagcccgccttaacctcccaaagtcctgagattacatttctttttattaagtaatttaatttatatttaaaactgcttcttaaaaatgaagttactggttttattgtaactgttttatgtgttcctgagtggtacgttttttcttattcactgttttattgccttaaattttattttaattgtgtagtgatgtgcttcaattatttttctaattttgttttgcacagtttctttaattattatctttataatcatgttgtctattcatgtgttttcatgctgctgataaaaacgtaccttaccctgggcaaattacagaagaaagaagtttattggacttacagtttcatgtgattgaagagacctcacaatcatggtggaaggtgaaaggcatgtctcacatggtggcagacagagagcttgtgcagaaaaactctgccttataaagccatcagatttcatgagacttattcactatcatgagactagtacagaagagacctgcccccatgattcaattaccttccaccacatccctcccacaacatgtgggaattaaagatgagacttgggttgggacacagccaaaccatattattttaaaaaatggagtttacattaaatatcttaaaattcaaacaatatactttaatgacaacttcaattgaatataaaattatacctctatgtttttcagtttgttattaacattaaaaatttttagactgggtgcagtggctcacgcctgtaatcccaacactttgggaggccgaggtgggcggataacctgaggtcaggagtttgaaaccagcctgaccaacatggagaaaccctgtctctactaaataatacaaaattagccaggcatggtggtgcatgcctgtaatcccagctactcgggaggctgaggcaggagaattgcctgaacccgggagggagaggttgcagtgagccaagattgtgccattgcactccagcctgggcaacaagtgcgatactccatctcaaaataaaataaataaatataaattattttgtgtatttattaacatatttatgcagattgtattctgttttaaatattttacagaggagctttaagggttttatgcatcattattatgatagtaaagacttctatatttgtatatttacatttaatatagacttttattttatatgtggttttgttagagaaaataggaggcaggagacacccagtaggtgaaactggaggattttattaaggtgcaccctggcacaatggattcgcatccaaaaagctgagccttggactaagacagggcttgtcttttatacatgcatgggccatctagtggcgcaaagctcgtggtgcaagtaagcaggctcacagaagcagaacagaggcagttaatcaaacagtgacaggttatgctgaccttgcagcttcactggaagggaaacatgaatttatcaaactaaagcaggccttgcagctggtacatgtcttactcaagctcgtcttgtaaccttgtcatgttatccagaacagagaaactggagttgttgtgaagtaaccttgagtttcactaaggaaggattactaaggggaggaggaagctaggagaggaggaaaaattgtttttcccatcattgctctatgggaggagaggggataaggactagttttctttacatcctctacttcatttccccctttgacgctttttataaatgacgtttaatagcatcactatgacttaatttttcatgaaaaggcaagttttcttcatttggcaaaggctgatatttagttagggtcattagttgtgtagtagtttgcctggttacaagagcctctgtggccatttagatgtttttgacaaggaggggtaagagacaagggagtatgaggcagactcctaatatggctagaactattcttactaaggttttaaattctgcaagggatgagaactaacccctgaagagggaatctggagaccatcctttctaagtcttgactggaatatgggctaatttttggattcttgcagctttttgtttgacgacctttccgttgtcatcgatttttagacagcaattagttaggctgaactttctacatactcctccctcttgggctaggaggtagtctaaagccagtctattttgataaacggcatttctcatttctgtagatttccgagccagcaaatttaaggctcttgcagtatcattcgtaatgatctccagtactgcctgcaaccatatgatgtgatttagcatgtaaataggggtgcggtatctccatgatccatctgcccatgtggctgggccatagtattgcattattctttcaggtggccattcattatctttaattctttatggttattccccttttatttcttttgacctgacatgaacctccaactaggttctaggtaaggactttgggtcataacatatataaggctggccacttcctgggttgcagattgagtaggttatctggttgtgtgtacaagttcctcaatgggtccctgcatacctataataagtggtagaacagggttctagtcatggtgcttcctgtctacgtattgtcagtgcagtgggggcatccttctaaggattctccctttaacgtggttaaagggaatagcaaaagtaatgaataacatgtttatacctagcatggagagaagaggtcctttcctagaggaggaggttgagcaaagcaacaggacaatagtaaaacaattaatattacaaggaaagtttccagacgtaagatttctaaccacttttactttcctgatgatgcctcgagctttggccgtacatagacgagtcagcttctggggtgactagaacagggctgttgtttcctcaagcttccaccgtgtgtagactggtcagcttctgaagtgaccagagcagggctgttgtagtcttcattggcacctcggtcccatcataggatcagctgggttggatggcctgggtccttctggctggtccacttgtcttgggctaccagtttcagccaactgtggtgaatccaaggcacgattcctgcaactttagcagcagtgagtagacaagattacaatatggggcccatcccatatgggtcccagtgttgttggattccattttttaaactaaacagagtccccgggtctaaagggataaattgggtctgtgaggcttatgggcattctttcccatacccagccatgaattttttgcatggctattcttaaagcctgcatctctctccttaaggctaattcctctagttcacagagatcacctttaaattggccgaacaagatctcataggtgaatacccagtttgtttggtgggggtgtacctcacttggaggaggaccatgggcaggacctgatcccaccttagatgagtttcttggcaaaatttttttagtagctgtttgagtgtctggttcatgtgttccactttttctgagctctgtggccagtaggctatgtgtaacttccactttattttcaataactgtgttagttcttgaactatcttggctatgaatgctggtccattgtctgacgctagagtcaggggcagtcgaaatccagggataatgtctcttaacagtactttagttacttctcgtgctttctcagtcctgatggggaaagccttgacccatcctgaaaaggtgcagacaagtactaacatgtttcaatatccccctgcttggggcaacccataagcagattttcacaaggtgtggcccctatttcctgcattcccagggtcctggtgggcccctgtattaggttgttctgggcacaagttaggcattgttcacaaatggctcatgtgatggcagtgagccgtggcacatagaagtggtgtcctaatagcgtctctagtgccgtttttcccatgtgagttccttggtggaattgcctcacaaatttggaggccaccatttcagggatggctagtctcacattagataatttccaccatcctccttcaatatgttctccagattcttgggcaaaccaggccctgtcacttagagagtaactccgggtctcctggaggggagattgcgggaggagaggcatggtcagggcttcttttctagagtgtggagcagtcaatgctgtctgtcttgcttctctgtctgcttttccatttcccttggcctcctgtgtccctgacttctggtgtcctttatagtgcataacagctaccttctctggggctcatacagcatctaagagctgtataatttcttctttgtatttatttctttgcccctggcagttaaaactcctccttatatatagcaatgtggcaaaagcatatttggaatcagtataaatattgatctttttgtcctttgctagcaaaagggctcttgttagagctatcagctctgctttttgggctgaagtttctgtgggcagagactgagcttccaccaccaagtgcaatgttactactgcatacccggcccattggactccttccagtacaaaactgcttctatctgtaaagtactcgatatctgggtccctgaggggttggtctgtaagatctctccagcttgagaatacctcatcaactgtgtctatacagcaatgaagagggcctcctggttctgattgaattgggagcaaaatagctgggtttagagtgttcacagtctctagagttacgtgaggatttttacatagaagcccttgataccaactcattattggatttgataaccaatggtgccctctctgatcgattaatgttataactcagtgcgatactcaggtggttagttgctgtcctagagttagtttgtcagcttcccatgccagtagggctgtggcagctaatgctttgaagcatgggggccatcccagcgccatggagtccaactgcctggataagtatgccaccaggcgatgccatgatcccgtgacctgagttaggactcctatagccattccctttcactcatgggcctatagaaagaaaggcttagttagacctggcagtcctaaggctggagccctagttaaggcttctttgatttgtttaaatgccttttcctggtctgcctcccagaggagggacttcttccctgcctcccccacttctaatgtgaccatgggctcctgggggcctagggagaaggaacccggttggtcctagtcctcatattcttaattctctgccagcccgatcaggtcggcatctggctccctcagggtgtggcagcccttggctgggggcctctttgtttcatagcctttgccattctcttcattgtcctctggacattcatttttctagtgtcccttctttttgcactgcacacattgacctccccttagcctcagccatctcttggctcgctgttcaacttggcctcttccatgcccacacccatgtgaacattcgcgtccctttacaatgttaattttcctttttgtgagggctgccgctaacaggttggcctttttcctaagcctctgctctgtttccttttttgcctcttggtcacagttaatgtacacctcggtggccacttctataagctgggtggcattcatgcctgcaaaaccctctagcttttgcagcttctctctgatgtcaccctgggcttgccttacaaatgctgcattcaccatgcactgattttcagcagcctcagggtcaaatggagtgtaaaactaaaatgcctcacagagtctctcataaaactggctagggctcccatcaattcgctggagtacttcagagaccttccttatattgattgccttttttccaccttccctcaatcattgcagctgtgcttcttagtacctttgcaggcgctgaagctgggttgcgtcatttgggtcccagttgggatctgtttctgggaattggccctgagcatatgcctggacattaagggtgccttcaggcacactggcttctagccagcagagagctgcctgggctatcctttgacactccttcgtgttaaacagcgttaggaggagattcctgcaatctggccaggttggattgtgcattaggaagatagactgcattagatctatgaggtcctgggggttctccgtgtaggagggggtatgatgtttccagtttaggagattagtggtagaaaaaggctggtaaataaaagtctgttgccccccttggacctggccctgttcatcataataaataggtccctgtgttttctggaggggcatctgcaaagctctggtgtgggtaaattgaaggtggcctgcttgatcatcttgacttccttcttcacctcctgggacaggggctcagatttgcccctttagggtgtagcctggggcatgataccatctgagttgggctgctcagtggccagccttggtaaaggtgggtagattggtgcatagggaggaggggtttctatctcctccggtggttcctccaaaactggtttctcctgtctttcctgtggctttccctttgtctctgtagcttccagcaaagctgatttttttttggtggcttaggctcagcttgagcaaaaagctgccaggcaagtctgcaaccatgcaggtggagtctgtactatatttaaccatgagtcaatacaagggaactggtctaggtgccctgactgtcctctgaccccagttaccaccttaaatacatagccaattgtttccttatctacatttccttcagctggccatctaacatcaaaagagggccattgtatttcacagagagttctcagcctctgggggtcaacttaattccatagtccccgaataacctttcttaaagttccttaacatacatgctaatcgggtgggttttggtgacttccctcccatttcctccccaatacagcacaacacattcattcttccttttgattcagaccaattaaaccatcccccttgcaggagttttcagacactgcttagctttggagtttgttaatcccctcacaattactaaattgtggggcacctccataagccgtatgtggattgccactagtcccggttggtcccacaattctctcagagcgcacagtctatactaagagagctgtagcccccacatgtcactgtctgcattggttcctcccaaaaccatctctttcacacacagtcacacaccgtcctactcccagttttctctcctaactgacttcgcgagccactcttatgccctagtcacttggggtgtaagtttccctgagtttgcaaaccattcttgcatcctgtgtcagtctactagttacaccttggaaggtgatcaggctccccttccatccttatgggacggttcctgccttgggccccaaaaccttaccgtggtcctgtagtgcactgttcctggaatcatcctgtagccccttagattctgttgtgctgtctgggaggggcactgggttgtgggatagctgatcccttcttcaggtttaagttctcctgatggcacctgaggtcatgggtctctcctggcttggggtctcacacctaaaggcaaagtagacagcaaacctgtcatctccatctcctggctggctcaccaaagtgttgcagaaaacaggaggcaggagaggccagtgggtgaaactagaggattttattaaggtgcacactggctcagtggattcacacacaaaaagctgagccctggacaagtacagggcttgtcttttatatgtgcatggtggccatctagtggcacaaggctcctggtgcaagcaagcaggctcacagaagcagaacaaaggcagttaattaaacagtgacaggttatgctgaccttgcagctgcattgggaggaaaacaggaagttaacaaactaaagctgaccttgcagctgcattgggaggaaaacaggaagttaacaaactaaagcaggccttgcagctggtatacgtcttactcaagctcgtcttgtgaccttgtcatgttgcccagaacagagaaactggagttgttgtgaagtaaccttgagtttcactaaggaaaaattactaaagagacagggaagctgggagaggaggaaaacttgtttttcacatccttgctctttgggagaagaggggctaaggactagttttctctacatcctctacttcagttttatgatggtgttcattattattttatttttaagcaaaattgactcattatagcatttctttttttttttttttttttgcagagtctcagaatgctcttaaactcttagtctctagtgttctgacagccttgacctcctaaaactaagattacaggcatgagccatggtgcctggtcaccatgtacctttttttgtagaactgtgctagtggtgatgaacatcttcaccttttattttggaaattctttattttcatcttctttttaaagggaagtaaatttaaatcaagtattattggttagaaatttttttttattacatcaaaatttgggaagttttcacccttttttatcttcaaataacctctgtattttttttcttcattttcttcttctaagatttcctaaatctagttgatggttatctaataagttgtttgttttgttttgtttttgtttttgtttttgttttttttgagatggagtctcgctctgtttcccaggctggagtgcagtggcacaatctcagctcatggcaaactctgtctcctgggttcatgccattctcttgcctcagcatcctgagtagctgggagtacaggtgcccgccaccacgcccagctatttttttatatttttgtagagactgggtttcaccatgttagccaggatgggcttgatctcctgacctcatgatctgcctgccttggcctcccaaggtatctaataagttttacattccatgttttaactttgttttgcaattatagatttttgtgttatatattttagggtatgccaccacacattcattaattgtgttttgattttttagtatttattataattatgcatgctaatttttaacatcttataatttaaggcagtgtggaagaaagtcaaatatgaatgagctatacgtctttttccaatagaattatctctgtgtttgttttcctgtatacaaaaataaatgttatccttgtattttttttctaacttgtatatttgttgtgtaggtttgttgtgaatggttttctaattctgcgtagatgagtcatcataaaatactctttttttttgagatggactcttgctcttcttgcccaggctggagtgtaatggcgcgatctcagctcactgcaacttctgcctcctgggttgaaatgattctagtgcctcagcctcctatgtagctgagattacaggcatgtgccaacatgcctggctaatatttttgtatttttagtagagacagggtttctccatgttggtcaggctggtcttgaactcccaacctcaggtgatctgcccgcctcagcttcccaatgtactgagattacaggtgtgagccaccatgctcagcccataaaatttttataatttcaacaacctatttatttgtaaatctatatgatttctgtgtgggagaaacacttttggatttgaatataatttaaaactatcataactctgtatctcttttagttattattgtttatttcttgtcaaaaaaaaacaaaatttaccacaaaatatttttaaatatttagtcatatcaattatcttgacattgtcatgcaacatattgctagaatgtttttatcttgcaaagctaaatcttaacacatattaaacaacaagtactaatttttaattttttctttttttcttttttctttttttttttgagctggagtcttactctgctactcaggctggagtgctgtggcatgattcacctcactgcaacttccacctcccgggttcaagcaattctcacgcctcagcctcctgaatagctggaattacaggtgcccatcaccatgcctggctaatttttgcatttttagtaaagatgcagtttcaccatgttggccagcgtggtttcaaactcctgaccttaggtaatctatctgcctcagcctttcaaagtgctgggattacaggtatgggccaccatgcctggccacaattttttctgttttatagcgttttgcaaacaccactctgttttttgtttttaacagtataactacttcatgtatgtcataaaatctgtgtctttttgtgattggctcatttcattttgcataatgccatcaagatttatatttatagttggtagaatatttcctgcttttgaatactgagtatattccagaatatatatatatattttttgagacagtcttgccctgtcacctaggctggagtgcagtggggcgatcttggctcactgcaacctctgcctcctgggttcaagcaattcttttgcctcagcctcccgagtagctgggattacaggcacgtgccaacacgtttggctaatttttgtattttttttttcagtaaggacagggttcaccattgttggtctggttgatctcgaactccttaccttgtgatctgcctgccttggcctcccaaagtgctgggattacaggtgtgaaccaccgtgcctgggaagaatttttatatttcaaattatatctactgaatgatttattgaaagatatttgcattgcttttacctatttgcttacagtaacaatgctgcagcttttccgcgctacctgcagaggggtccatacggcgttgttctggattcccgtcgtaacttaaagggaaactttcacaatgtccggagcccttgatgtcctgcaaatgaaggaggaggatgtccttaagttccttgcagcaggaacccacttaggtggcaccaatcttgacttccagatggaacactacatctataaaaggaaaagtgatggcatctatatcataaatctcaagaggacctgggagaagcttctgctggcagctcgtgctattgttgccattgaaaaccctgctgatgtcagtgttatatcctccaggaatactggccagagggctgtgctgaagtttgctgctgccactggagccactccaattgctggccgcttcactcctggaaccttcactaaccagatccaggcagccttctgggagccacggcttcttgtggttactgaccccagggctgaccaccagcctctcacggaggcatcttatgttaacctacctaccattgcgctgtgtaacacagattctcctctgcgctatgtggacattgccatcccatgcaacaacaagggagctcactcagtgggtttgatgtggtggatgctggctcgggaagttctgcgcatgcgtggcaccatttcccgtgaacacccatgggaggtcatgcctgatctgtacttctacagagatcctgaagagattgaaaaagaagagcaggctgctgctgagaaggcagtgaccaaggaggaatttcagggtgaatggactgctccctctcctgagttcactgctactcagcctgaggttgcagactggtctgaaggtgtacaggtgccctctgtgcctattcagcaattccctactgaagactggagcgctcagcctgccacggaagactggtctgcagctcccactgctcaggccactgaatgggtaggagcaaccactgactggtcttaagctgttcttgcataggctcttaagcagcatggaaaaatggttgatggaaaataaacatcagtttctaaaaaaaaaaaaaaaaaaaatgctgcaataattatgagtctataaatgactacttatatgaccatatatgtgaaagtttatatatgtgctgcattctattttattagtctactttttcacctttatactcatatcaaattgtttaatttggtagctttgtaatgtgttttgaatcaggcactttaatgcctgcagcattctttctttctttttttttttttaatattgttgggtagtttgtttttcttttgagtctctgtatacttttgaggttggtgtttctatttcttcaaaaatgcaatgagaaatttgaaaaatattgcattaaatctgtagattgcattgagcaggatggactctgcaatattaagtatttcaacctttgtgtaagagcacactcaagagtgtgttgtttagtttctatatatttgtaaatttttcagttttttttttttgcttttatcgttgtatattctcattccattttggtcatagaatgtagttcatagaaatttacttttaaaaaatttgataagacttcctttttgtcctaagatgtggtctttcaagggaaatgttgtatgagctattgagaagggtgtgtattctgatgttgttgaggagtgttctccataactctgtttggaataattgttttatactgcctttaagtagtctgttcttttattaacattctttcttgttttagttttattacaaaaagtgtggtattaaaatatattgttctaattatattgctttctgtgtgtttcttccattctgtcaatatttgctttatatacttggaaccctaatgtgagacacacacacacacacacacacacacacacacaaatttgtcatagattccctgtgaatgaatctattattttttgatgtccttctttgtttctttggagtttcaatttcaagcacattttataaaatattatactttctgacttaagatgtagcttgtgtgatattattttgactctttctgctcttatttgattaatgtttgcatggaatgtctacttccatcctgccacttacagtcttttttaattattagacttactgttattttattatgcattttatttgattattgcatctttgtgtcttattctctttccatctttgtgtctttttgatgtttgcattgatatgctttcgcttatttatttatttatttgtttgagactgagttttactcttgttgtccatgctggagtgcaatggcattgatcttggctcaccgcaatctccgcctcctgggttcaagcaatttacctgcctcaacctcctgagtagctgagattacaggcaggtgccaccatgcctggctaattttgtatttttagtagatatgaggtttctccatgttggtcaggctagtcttgaactcctgacttcaggtgatccacccgcctcggcctcccaaagtgctggaattacaggcataagccaccatgcccaacctcttttgtgtatttatacaaatatttttgtggtaccttggggactacatataatgtctaaaagatacaacaatacattttaatctggtagaaaaacaggttgcatacaaaaattcttctttattacatcttccctcaaatttgtcattgatgttgctaattatatcttatgttgtatgttcattaactgatgtttataatgatttctattcttttattgttcaaatttcagagaataattaaaaatgttttctgcgtcactaggataatgctaataaattctacaaagtgaatttgcatattttttctagaaaataatgtatttttatataattatgtgtagctttttgaatcatgttattttcagtaaaaggaactgttgttagcaccttttatatgtagggcatatgcagttccaatatacttttttagaatttcattactttggaaggttttttttttttatttggcaggatagattcactgatggtataattctcacttaataggtattttttttaacaactttttcatgactccataacatagttctttttttgagactaaacgtctctctatcccccagccaggctggagcatagtggtatgacttcaactcactgcaacctccacttcccaggttcaagtggttctccagcctcagcctcctgagtagctggtattacaggcatgtgccaccacacccagctaatttttgtcgttttggtagagacagggtttcaccatcttgtccaggctggccttgaactcctgacctcaggtgatccgtccacctctgcctcccaaagtgcctggattacaggcaggagccaccatgcctggcctggcacatcacttttatcttgcagcttcaaagataatctttttgtctttgactagaaattgtggttatatacatgtttgttataaatatctttctgtgatactagtttgttgtacttctttatttttacatcatattttcttttaggatctattagttttttttaaatttttttacctccacaatttttgtttttttgaaatcttaaatatttttgttcttgtcctcatttttctgaatttccatagttgtctctgttcctattttaatcaatgagaactattcaatttattaccaattattaaaagtaatttatacctctgattttttttatgctttctttcagaaaaatttataatatttttgctgggatcatattgccctattttgtatattttatctttgattgtgatttggacattaaaaaaagctacctgtcaaaatctttataatgttgttctgtcctggcatagtctgaaaacaattgttttggctggtgattatgggagtttctcacacatattcttaggatatgtgctgtctgaaattttgtgtttaatttttaattaacagagtttactcttgttattttgtaggagtcagaaatcacttgctacacctgttccttttctgtggtactgctgtcagtctgctgctctaccacttttttttttggtctcagctgactcaaactctcatttcaaaatatgccaccatttctttcagcactttatgtcatgagagactgaaacaagtgtcagaaaaggtccctaaaagtcagaaataacaacgaatgtgccagtattttagctttcttttaaaacagaaaccaagagttaggaatttacttctgaaggtactacgttatagtggaaagcaggaaaagctgtgttgggtgaatttaacacttcctttttttctttgtgctcacctggaacactgcacacacttatttataaattttttacagatgtatttgggtctgtatattttagttacatttatatatctataaatgaattagagcctgtggtattttgcaatgccctcttgtttatgtatttggtataattttaaaggtaagattttaaaactatatccatgtgagtctagtaggtggagtaatttattatttttatttttatttttttaggtatatgccctcattttgcttaagacctctggccagagcagggcatggaagattccttttaaaaagtaatactgagaagacatgaaaaatgtggacatgataatttactgttgagaaatggctgtaaaagtgtggatgagtgtcaggtgcacaaagaaggttataatggacttaacaagtgtttcacaactactcagagcaaagtatttcaatgtggtaaatgtttgaaagtcctttataaatttttaaattcaaacaaaaaataagatatactggaagaaaacctttcaaatgtcaaaaatgtgtcaaatcattttgcatgctttcacacaaaacccaacataaaagcatttatactagagagaagtcctacaaatgtaaaaaatgtggaaaaacctttaattggtcctcaatccttactaataataagaaaattcatactgaacagaaaccttacaaatgtgaagaatgtggcaaagcttttaagcaacactcaacccttactacacataaaataatttgtgctgaagaaaaactttacagatgtgaagaatgtggcaaagcattttgccagccctcaaccctaactagatataagaggatgcacagaagaaagaaactctacaaatgtgaagaatgtggcaaagcgtttacccagttctcaacccttacgaaacataagagaattcatactagagggaaacattacaagtgtgaagaaagtggcaaagcatttatctggtcctcaggccttactgaacataggagagtccatactagacagaaaccctacaaatgtgaagaatgtggcaaagcattaattcaattctcaaccctaactagacataagaggatacacactggagagaaacccaacaaatctatgtggcaaaccttttagccaaaactcaaaccttactatatataagataattcatactgaaaagaaaccctacaaatgtcaagaatgtggcaatgcttttagccagtccccataccttactacacataaggtaattcatactgggagagaccctacaaatgtgaagaaggtggcaaagcatttctatggttcattaccctaactggtcataagaggatgcacactggagagaaaccctacaaatgtgaagaatatgaaaaagcttttagccagtcatcaatccttactcgacataagataattcatactggagagaaaccctacaaatgtgaagaatgtggcaaagctttcagccagtcctcaacccttactacacataagagaattcatactggagagaaaccctacaaatgtgaggaacgtggcaaatcttttaacctgtcttcaagctttactaaacataaggtaattcacagtggagtaaaaccctacaagtgtgaagaatgtggcaaagcctttaggcagtcttcaatttttgctaaccataagagaattcatactggaaagaaaccctacaagtgtgaagaatgtggcaaatcttttaacctgtcttcaagctttactaaacataaggtaattcttactggtttaaaaccctacaaatgggaagaatgtgccaatgccttttcctggtcctcagccctaactaaacataagaaaatttatacttgaaagcaaccctacaaatgggaaaaatttggcaaacctttaatccttacaacttaatgcacataagataacttatattgaagagaaatattacaagtgtgaataatgtgtcaaagcctataaaaagtcctcaattctttacagacataaggttatttatactggagagaaactttgcaaacctgaaagatgtgccaatgcttttgacaacaacttaagcttttctaaacataaagaaaatcatgctgctgagaatcctagaagtgtgaagaatgtgacaaagcctttaaatgattgtcacacttgattgtaggtaaggtaattcatactggagataactatcagtgtgtacaatgtggccaagcttctaactaatgctcacacgttattgcacaggaaagcatttataagcatttatacttgagaacaaatgtgcaaatataaagtaaaaaagccattaatacctgctcacatcttactcaaaatcagatagttcatatgaaataaaagcataaaagtgtaattactgtccaaagatctattagaaaatatgtctttaaagtgcagaagagtatttactttaaaaaagcactacaaatataaatagggttgtaatacctttacttgtatcagaaatcttattgtacacattttgtgctagaggaaaaccctgaggcagttgttaaaattttgtccaacatcagtgagtttatattgaagaaaaccctgcaaatataataaatttggaaaaacattttttcaaaaactacaaattataaaacaccaaagagtttatactaaaatatatttttgcaggtgcagtaaagatgaaagatatttaatccaaaattgtctatgtaaatatcagaataatccacagtagaaatatctagggccactcaatgtttagacactactgtaaatcagagtgctgcgtataaaaaataatacaaaactatagatagcataaacattatttgtatataactttaaaagaagtagaatattttttggagagttataattacattcaaattatactttttatgaacatacaggtttttttcgaagtgaataataatgaagttaaactcttaaattacttcatgctcttccatattcctggtttattcaaatgtgaaagcatgtgactaattgttgctggacaaaatatatgagagattcttgtttattaggtaagcattacttatgaccttttctatggaaaggtaaggacattaaaatgtaagatgcataatgaaaatttaagtagagaggctctttgtggttaacttataatattttgtgatacatgaggtaggtgttcagagtaatactcttctacattattatgaaagaaaaatattcttaattttagttaaaattaggttagtaatgttattttattaattgcacttttatggaatactatacagcatatttttaaattataaattatttgtgaaattaacttttcaattccacatttttaacatgttaaatactatcatgaatccattgaaatgttattgtgccactaactttaacctattccatcttacacaagggtgtaggtaacaatacattatttggtaagataatggactgacatcactagtaatctttattgccagtaactttaaatggccaataagttaaaaaatattgttcctataggttatatttttattcttattttcacatttaaatgtatttttcttaatttctgtggatatatgtttatatgtttatgccatatatggcatattttaatacaggaatacaaaatatgataatcacattagaggaaatgagatgtccattacctctagcatttattctttgtattacaagcaattcaattctacagtttaagttatttttaatgtacaattaaattgttattgactacagggtcatttttatcatcataatacaaattatatacaaacatgtaaaatccatacatttctgagtccttaataaatatttttataaattttaatatatttttctttgaacatgtggcctttgcctgcaagcacatatggactgttagtattgatttacatagagttaaatattcacatctattagtctaaagataaactttaggtctaaataaattatggagtaagtctgtttgtgtgagtataaatttgaaactatttttagcagaaaaaaatattagaacaaaataaatcattttaatcaggggcctaattcactagaaaacaaaaattctcaaaaatggtgaaagcaaatctatgctctctgctttgtattgaatttattaccgtgcaatcttttggctcagggttcagaatctccccatgcaaattctctgttttaatttgactggtactcatgctagtcccgtaatattctttttttgtttgtttaatagtttttttttttgttgttgttgttcttgtttttttcttttgagatagagtcttgctctgtctcccaggctggagtgcaatggtgagatcttggctcactgtagcctctgcctctcaggttcaagcagttctgcctcagcctcccaagtagctgggattacatgtgcccgccaccatgcccagctaatttttgtattttcactacagacagtgtttcaccaggttggtcacgctggtctcaaactcctgacctcaggtgatccatccacctcagcctcccagagtgctgggattacaggtgtgagccactgcacccagcctgtgtaatagtttatgaagtattcattatgtgaactggtctgtaattataagaatatatatttttttaattttattgttccataagttattggggtataggtggtatttggttagataagtaagttctttagtggtgatttgtgagatcttggtgcacccatcacccaagcagtatacactgcatcatatatgttgtcttttattcctctcccttcccactcttctccccatgtccccaaagtccattgtattattcttatacctttccattctcatagcttacctcccacatatcagtgagaacatatgatggttggttttccattcctgagttacttcacgtagaataatagtctccagtctcatccaggttattgcaaatgcttttaattaattacttgttatggctgagtagtattccaacacacacacacacagacacacacacacacacaccccacagtttctttatccactcgttgattgatgggcattttggttggttccagaattttgcaattgtgaattgtgctgctagaaatatgcatgtgcaagtatctctttcaaataatgacttatttttctctgggtagatacccagtagtgggattgctggatcaaatgataattctgcttttagttctttaaggaatttccacagtttcctatagtgactgtactggttgacattcccaccggcagtgtggaagtgttctttgattgctgcatccatgccaacatctacagttttttgatcttttgattacggccattcctgcaggaatagagtggtatcgcattgtggtttgatttgcatttccctgatcattagtgatgttgagcattttttttaatatgtttgttggccatttgtgtatcttttgagatttttctattttttgatttttttcttactgatttgagttcattacagattctgtatattagtcctttgtcagatgtatagattgtaaagattttctcccactctctgagttatctgtctattctgctgactgttccttttgccatgccaaagctttttagtttaattaggtcccagctgtttatctttgtttttactgcatttgcttttaggtttttggtcatgaaattttggccaaccaatgcctagaagagttttttcaatgttagcttccagagtttttatagtttcaggtcttaggtttaagtccttaatccatcttgtgttgatttttttttaataagatgggacatgaggatccagttttattctcccacatgtggctagcctattatcccagtaccgtttgttgaaaagggtgtcctttccccactttatgtttttgtttgctttgttgaaaatcagttggctgtaagtatttgggtttatttctgggttctctgttccattggtgtatgtgcctatttttataccaggaccatgctgttttggtgacttatagtatactttgaaatcaggtagtgtgtttcctccagatttgttcttttttcttagtcttactttggctatatgggcttcgtatgattttttgaattgttttttctaactctgtgaagaatgttggtggtattttgatggggattgtgttgaatttattgattgcttttggcagtatggtcattatcacaatattgattctacccatccatgagcatgggatgtgtttccatttgtttgtgtcgtctatgatttctttcagcggtgttttgtagttttccttcttttggctccttcattaggtatatttcctaagtattttatttttttcagctattgtaaaaggggatgagttcttgatttaattctccatttggttgctgttggtgaatagaagagctactgatttgtgtacattaatcttgtatccagaaacttttctgaattttgtcagttctaggagctttctggaggagtccttagggttttcaaggtaaataatcatgtcatcagcaaacagggacagtttgacttcctgtttactgatttggatgcctttatttcttgtcttattgctctggctatgatttccaggactatgttgaagaggagtggtgagagtgggcacccttgtcttgttcccattttcagagggaacgcttttaacttttccccattcactattatgttggttgtgggtttgccatagatagcttttattacattaagctgtgtcctttttatgccaactttgctgagagttttaattataaagcgatgttggattttgttgaatgttttttctgcatctattgagatgatcatgtgatttttgttttcaattctgtttatgtggtgtatcatttgttgacctgtgtgtgttaaaccatccctgcatctgtggtgtgaaacccacttgatcatggattatctttttgacatgttggatttggtaagctaatattttgttaaggattttagcattaatgtttatcaaggatatgggtctgtagttttctttttggttgtgtcttttcctggttttggtattagagtgatgctggcttcatagaatgaattagggagagttctttatctagtgtcaaaaggtttggtaccacttctttgaatttctggtagaattttgctgtgaatctgttggatttttttttgttggtggtaagttttaaattaccattttaatctcactgcttgttattgatctgttcagggtatctaattcttcctgttttaagctagtagggttgtatttttccaggaatttatccatctcttctacattttccaggaatttatccatctcttctatgttttctagcttatgtgtatgtgtgtaaaggtgttcttaggagccttgaatgattttttgtatttcagtggtgtcagttataatattctttagtttcatttctcagtgaggttatttggattttctctcttcttgatcaattttgctaatgatgtatcaattttatttatcttttctgagaagcagctctttgtttcatttaccttctgtattttttgtttatttgtttgtttcaatttcatttagttctgctctgatcttgattatttccttttttttctgctgggtttgggtttcatttgttcttgtttctctagttccttgtctgtctgtgctctttcaaactttttgatgtaggcatttagggctatgaactttcctgttagtaccaccttagctgtatcccagaggttttgataggttgtatcattattgtcattaagttgaagaattttttaatttccatattgattttgtttttaacgcaatgctcattaaggagcagattatttaatttccatgtatttgcatggttttgaaggttcctttgggagttgatttccagttttattccactgtgatctgagagagttcttggtataatgtcaattttcttaaatttattgaggcgcgttatgattgtctctgctgattcattcagggtgtcagggacgtgggggaaagctggcagtcacaggcctcactcagctccagtggaaaccaaaaggctggtctcacacccactgcacccctcacaacagccccaaatctgtttccatgtggagggcaagttgggtttgaaaattaccccaggctttctgtttctcagtgtggtaaaataaaaaggctttagttcttccccacctgtgaagtgttcaagccagagtcacgccttccctgagttcttgccaggaggcttcttgccccattcaaattgttatgaagttcagctagggaaatccttctccccttggagttttaccccttgcttctctgtcctcctccctctcccatggattcctgtggtgccaggcaggaatgggctccttggggattcagcgagctcccagggcctccctgttgcctcctgaacccctgtatttcactcagcttggctctctaacttgactcacctccaggtagtaaggagcttctcccacaaacagactttcagtttctccagtggggtcgttgtgttcaggagaagagagtctccctttcccacttctgcagtggtggcactcactgtatttggggtgtctgtcaggtcctgcaggagcagtctgcttccttcagagggttgtcctgatgcctttaaggacatattctgaagataaaggtggtgattttttcagatactctctcctgagaaggaatcagagaagagagaaaaaatggttgattctcaaatgaatgtgtcccaggtcaaaactgtgtccacattttcttctagaaggtcatgtatttacagttgcaatcattttcatttctacttctgatgcttttgcctaacaagattatttgaagtaccttttttcttctcatgacagtgaaatgacctcattaaaataattctcccctatgtttcagagccttatctttattctctccatccaggcttcttacatatcacaaatagtaccttgaatttataccgtgaaatattgaaagtattccctttgttgacagatcagcctgagcaggtgaagatataaaacattcttattggggatggtgctgggtcctcagatatcagtgagggagaaaactgcaccatttaggttctatctgaatgctccatcagctctatgaataacacaatttttaaatgcacacttaaaaaagatggaattaatggcctggaataatttagaaagatatgtaaaggaatgaattcaaagaaatgtgccttctagaatgcttaaagagagagtatttagatacactattagaaattacaaaacatgcgctgggcacggtggctgacacctgtaatcccagcactctgggaagctgaggtgggcagatcacctgaggtcaggagtttgagaccagcctgaccaacacggtgaaaccccatctctactaaaatacaaaaaaaaaattagccggacactgtggcacgtgcctgtaatcccagctacttgggaggctgaggcaggagaatctcttgaacacaggaggcagaggttgcggtgagccaagattgcaccattgcactccagcctgggtgaaaacaacaaaactccgtctcaaaaaaaaaaaaaaaaaaaaaaaagacaaaacatggacatcgtatgtgccttgaactttacataaaacatgttttttatgattagattcagattatgatttatgtttttttggccagtaatctcacagaagtcatgttgcatcctccaatatgtatcagcacctgataccaatctgtctcattaattttatttacttggttaacgtgttttctcaaggatttcttccctataatgtttcttttaaaaaactgtattatttgggaggccgaggcaggcagatcacgaggtcaggagatcgagaccatcctggctaacatggtgaaaccccgtctctactaaaattacaaaaaatcagctgggcgtggtggtgggcacctgtagtcccagctactcgggaggctaaggcaggagaatggcgtgaacctgaggggcggagcttgcagtgagccaagatcacgccactgcactccagcctgggcgacagagccagactccgtctcaaaaaacaaaacaaaaacctgtattattaacaggtactttggagaaactttctgactaatgtgcataaacaatcacatttaatctgaaagctcccctgtcacgccaagtgtcaggttccaacccaatcggaggtctgacaggagtgggtgggtgatttgtgggttactggaaaaacactcatggaattgtgggcagttttgagatggctttattctctaggcataagcctgggcatgagccctgtgtacagggtgagcagcttactctctctcctcctcctgttcacctgtctgtgtactccttacactcagtagcggctgagagctaagtatgagcttatacaaccaggttacatattagcagagatgagcacttgtactccaaacttactgagtcaggctgaaccagatgtttaccacggcctattcttgaccactgcacatccatttatcttacaccctttttctgaatagtttctctttgtttatactttgctttggaaaatgaaggctgtcatttttgtttactggtcatatacactgggataaaacccaggttctatcagttactagatgttttacaaagtattttccttaagctagaatgattgacatcactggtgagtttgtttgcaatatagtaactcaggtctcatcccacatcccttgaattagaatacgtattttaacaaaatctccaggttattgatgtatgcattaaaatttgagaggtatctcctaagttactgtgacttctccatgtgagaactgtacacagcttactctgtataatctaaatatggcattcagaactgtatatacttgtgtttatgccataagttctatgccgtgttattcagaaaactatagtaattacactggttttttggatcttattttatcctctttgttcagaatgaaggaatgcattagagaatctttctctgttaagcaatattttattggataattccagtctcttatgtaaaacagagccaactctcttaactctgaaacacctagagtaaaattaacaattctgcccatgaccacttgctaaatatgtgtgttttttttttttttaggaaatgttaactttcaaggctgtggccatagaattttctcaggaggagtgggaatgtctgaatcctgctcagtgaaatttgtatagagatgtaatgttagagaacaacagaaacctggtctctcagaataaattttcaccagatttcctaatataccctaaggcttctattttctccctttgtagaatgattttgggagtttttgctccacataaattatttttagatcaacccttttaaggaaaacttgacggtttattgaaatagaaaagaaaatcttcaagatgttttatcttaacaggaaccatccccttttttttgaggtaatctgtatccttcactctagattaatgataattctagaaattcagtggcattaaatattattgcccaaataataaaatccaatatccagcaccaattttaaattcaatagtattggatagtagagctaaggacccagaaatgtaaaatatgttctaagtattctaaaggttctgtcagaaaacagtattttggaattaaatttctaaaatctttcataatattctctcctctgtactaaacatggtactaggatggtaactggagaatcccaacaaatcatgttaacttttttctaacaaatcaggctgtggtgtctctgtacctgatctgatctcctgccttgagcaaataaaagaaccctggtatgtaaagagacatgagacagtggtcaaatactctggcacgtaagcatgaatgaagcagataacacagacaagaggtacaaaggtcaaaaagaattccagaccttaaaatgtggtatgggatgctctgcttcaatggaaaggttcctaaaaagccattttgtttttttccctagttcttatataggagcatcttttgtcccataccattaaattctttatggactctacttcctatttagtgattttcctttgagggtaccatgagagctaaagtcctctttatggcttataaggtactgcatgatatacctgctcttccattgctttggggcaatatgagaatatctctaactatttttgagaaactgcatgttagatcatttgttaggttttcttttcccatcatatctgaaatgtgtgagagcagtggtgatattaagatttgtttcagaaatctcaggaacatcaatgacatgttacttgttatttatctatattgtcttgtcttttcttttttcttctgttttcttttttttgagatgaagtttcactcttgttgccgaggctggagtgcaatggcatggtctcagcttaccgcaatctttgcctcctgggttcaagcgattctcccgccgcagccttctgagtagctgggattacaggcatgcaccaccacacctggctaattttgtatttttagtagagatggggtttcttcatgttgtccagcctggtctccaactcctgacctcaggtgatctgcctgccttggcctcccaaagtgctggaattacaggtgtgaaccaccgcacctggcctctattttttctttttgatattaggaatcttaacagatttgaagtgatagctcatcgttgtttttgtttgtaattgcctgtttgtgggggctatttagcactttttaaatatatctattggtcatttgtatataattcattggcaaaatatttcttcagtgttttgactatttttcagttggtttatcattgttattatacttgtctttgctttgaattttctatatattttgaattttaaacttttcttgtatgtatggtttgctattgtgagcatgctgtgataaacatgcaagtataggtatcattttcacataataaactatttttttgggtagatacccaatggtgaaatttctgaatcaaattgtagttctatttttagttatctgagattaagcatactcatgttggctatttgtatgtctttattgaaaagtgcttagtaatgttattggtccatttttcaatgggatttcttactatgcttttagtttgagttatttgtaaattccaaatataagtttcatgttgtcacatagtttgcaaatatgttcttttattctttaggttgcctatttaccctgttattttatttgctgtgcaaaaactttttagtttgaatctaatttgtccatttttttataatataataataatataataacaattttctttgttgtgttcatggctagttttggtagcagggtggtactgacctgagagtgacttaggaagaattttattatcctcaattttttggaagagtttcaggaggatttggtagaatttttatacatttggtagaatttggctgtgcatttatctagttctgagcttttctttttcaagacttttttttattactgactcaatcatgctactcattattggtttgttcaggtactcagtttcttcctggctctatcttgggaggttgtatgtttccatgaatttattcattctttgtaggttttcaggtttatgagtgtctagttgtttataatcattgctagtgattttttgtattgctgttgtatccattgtaatgtctattctttcatttctgattttgtttatttagatttctattctgtttgtggttaatctagctggcaatttataaattttgtctttttgaaaaagcaactttttattctattggtcattcttatagtttttggtttttatttcatttggttctgttctgatttatgttttttttttcttcttctaacttggaattttgtttgttactaattttctagttccttgaaatatgatgtcaggtccttaacatgtaagctttctacttttttgatgcagacatttaggctataaactgccctcttagtactatatttgatgtatctcacaggttttattatattgtgtttctatttccatcttttttccccacacatttttaattttcatcttaattttctttttgagatgagttttactctgtcacctgggctggagtgcagtggaacaatcttggctcactgcaacctctgccttccatgctcaagtgatctttttatctcagcctcctgagtagctagtatcataggtgcgcagcaccacacctagctatttttaaattttttttgtagcaatgcggtttttgcatgttgctcaggccgtctcaaactgctgacctcaggcgatccacctgcctcagcctcacaaagtgctgggattacaggtgtgagccaccacctctggctggccatcctaattacttcatttacagtgactgtttgggatcatgttgttttaattgtttgtaaatttatagtttctgaaatttctcttgatatcaattcataattttattctactatggtctaagtaggtagttgatataattttgatttttgggagtactttgttgatttgccagctttcctatctcaatggtctctctaatgctgtgagtagaatgctgaatttctccactattattgtgttacctatagagatattgtgttacctaaagagatgtgtccatctctttctataggtttaataatatttctttttaaagtctgttttatttgatataagacagatactgctgtctgtttttggtttctgtttgtgttaatatctaccccctttacttttagtttatatgtatcttacaagtaaggtgagattcttgtaggcaacacacagttggatcattttttcttattcatttcataaatctatacatttcaatgaaggttttaattgatttatattcaagattatattaatattaaggctttgttactgtcataatgttaattattgccttgttttattttttctttttatctatttatatttgtggtttaataaaattatgtcctattgtgatttatttatttctctctttgttttataaggcctgttttatacttttatatgttttaatgatggtgaatatcaatcttttgtttttatattggaaatccctggaacatcttttgtaggcccagtctattggtagttagtttccccagcctttatttgtcaggataagactttatttcttcttcacttgtgaaggttaatctagcttgatgtaaaatttttggctggcatttttctttcaacactctaaaagtaccatcctgttctcttctggccagtaaagtttctgctgagaagtctgcttttagtctgatgtggttctatttataaatgactagatgcttttctttggctgattttagaattacttctttcactttgagtttagatactatgattattatgtgccatattgaggtctgttttgcattgtattctggtggtgattgctgagcttcctgtatatgtatgtctaattctattgctagagttgggaagttttcatcaattattttcttaaataggttttctaaactttttgatgttttttattcctcagaaactgataatttttgtttagtcactttatgtagttgcaaatatctccaaatctttgttcattctttttcatttctctccttatttttgtctcagtaaattattttaaaagacctgtttaaaggtctgaaaattctttttatgcctgtttcagtctattattgaatttttgaatgtattttctttttccttcattaaatctttaagttctacaatttttgtttctttttttttttctttaaggatgtctatctccttggcacatttcttactcatactctaaatttatttatttatttttatattggttttcagatttctcttgcatctctttgtattggggaaacccacccccaatatttcaacataggttctttctgttttccataaatgtcagccagtctgagaaataaagagaaagagtacaaagagaggaattttacagctgggctgccgggggtgacatcacatatcggtaggaccatgatgcccacctgagccacaaaaccagcaggtttttattaaggatttcaaaaggggagggggtgtaagaacagggagtaggtcacaaagatcacgtgcttcaaagggcaatatcagaaactcctgataagagcctatgttcagtggtgcacgtattgtcttgataaacatcttaacagaaaacagggtttgagagcagataactggtctgaccaaaaatttaccaggctggagtttcccaatcctagtaagcctgagggtactgcaggagaccagggcgtatctcagtacttatctcaaacacataggacagaaattcccagagcggccatttatagacctccccccaggaatgcaattcttttcccagagtattaatgtcaatattccttgctaagagaagaatttagggacatcttccctacttgcacatccatttataggctctctgcaagaagaaaaatgtggctctttttgcctgaccccgcaggcagtcagaccttatggttgtcttcccttgttccctaaaatcgctgctattctgttctttttcaaggtgcactgatttcgtattgttcaaacacgcatgttttacaatcaatttgtacagttaacacaattatcacaaggttctgaggtgacgtacatcctcagcttatgaagataacaggattaagagattaaagtaagataggcataagaaattataagagtattatttgggaagtgataaatatccatgaaatcttcacaatttatgttcctctgccgtggctccagccggtccctccgtttggggtccctgacttcccacaacatctctccctttctttttatataaacgtgccatggcgatgaaggcttgttcattctctcaatttttacacatgattctttgactggtccagcacactaaaaacaagccgattaaacagataatcataataccaaacattactacaatggagcccctggtagacttaatccaagtcatggggtttagtccagaaagactttctgccacctgatctaatgtataactccaggcacaatgtataaaccagcttgagagacttcaaaaatttgtttctttaatttagttatgtccaaggataaattatcttccctactgagaaggtgtcctttgaccatttcccatgaatgatcagtcttgttgtaggaatatggtgtgatacagaaatcagaagtattccaattgtactgcatttgcatgtgatgatcgagactcattagctgatccccaagccaaataacagactgtcttaaatcattcatttggtgaactaatttttgattgatgccttgttgagaattccacatttgggtggaattggcttgccaatcattgacaaaatgagccatttgaatagattggtgtaatgccactccagcagtggtgaccagtgcagtgactgtaattacacccatgatcacagcaactaaagtgaaaacaaatctcttagctcttttgagaattcattgtaacattcattaattaaatatactgagggggaagattcccaaggtctgggtaaagttaccagtatccagattccttcttgagctcgaaccaacatttcacttttcctggagtcaaaatgggagttaatacaagtgtataaatgacaattaatacattgggcagtttgtccaaattttgatatttcccactaacagcatgtaaggaggcttaacacaactctgtataggaatagtcagattggaggtaaacaaagcagaatgcttgaatctaccttgatactgagggaggggagcagcagtggcaatgcccgatgttctccaccataatgaagcaatctgaggtgcccagggatgccaaagaggtagaggggcatacctggattgagaagaattataatgccaattagggtcccataaaggaagattggcatcaaaaagaggaaaagggtttaaaggggatttatcatggggttcagaatcatggatgcgaggggcagcagtggtgacaacagacagaaaagtttccgctttccatactcacagcccggacatggcaatagccaatttccaaagttctgggtgttctgggcacagaatggggaatatcatacgaggcctcaggtgggtaatgcccttatcttcccatttcaagggaaagaatgagctgaacctcctatccaaagtagaatgatgatcctcatccttccaataagaaataaaataagtagcctccaggcattccctcctgccagcggagcaattgttttttaaatagccctttggtgcccagtctattactaaaccatatgagtcattttttttaatactactgcatgtcagttaacacaatcttcccaaattaaagtttcagatgggccctcaacatttttaggacatagttttcctacaggtttatattgaaagtatggggtatctcctattgctccccttttcatttgtcttaaaggagaaagggagaggccagagaccaaatgtcccggttctcttgtagttaatctctccggaagataagcagcccagacttgagtttgtagatggatacaaccaggtgcatgtctgaggcacagaggagggtatttataacccctagtaacattaaatgcagtgccgccttctcctggttgagtggggcaatggtcatctctagctccaggcatccacacactattgttagtatagatttctgcaggagcatccatccagatgagaggtcaaataagtggaggaaaaggcacataagcctaataagaataagtatgtgtagcaggtaagtcagtatgaggggaaattggtgagacagaaagtataaggaggagaaatattaaataaaacctattgtaagcaagatccagtgctgaaggaggaagagaagaacagagggatgttatttttaaggctaatagaaatggtgagattttttggtttaggagaagtgggattagttagaggggtctccattgccattagggaggattgaaccagacccattttgatttgtgtgccagtttctaaggaggtggcacagatctcaccaggtatgagggtggtctctgacacagacgtcttttctctgtggtgttcattgtcagtattcacacgaagtttaagtctcctagtgggcacccagacaggggattgatgatctcctggtgaaacacaagcataccctcttccccacgttataatcgctccaggttcccaggtattggtctgggaatttttccataacactggcttgccttcatttagggagaattttttttgcctgtataatggctttcagctgcagtcagagtattgtctttaggaacattcagaaagtttgaagtaaacaatgctaaatgtaattgggaatggggagtggttaaattattcttttgttgtttagactgtttggacaattgagtttttaaggtgtgattggcccgttccacaacagcctgtccctgaggattgtaagggattctggtaatatgggaaattccccattgttgcataaataaatcaaaagccttacatatccaggggcattgtctgtttttatctgatatggaagccccataactgcaaagcaagaatacttcttttaacatgggccttgccttctcctgtttggcaagtagcccaaataaagcctgaaaaggtgtctacagaaacatgtacatatgaaaatcttgcaaaggagctaatgtgagtcacatccatttgccataaatctttaggagttaggccctctgggattaataccaggttcctgatttggaagtataaaaacttggcactgagagcagcagtggacagtaagcttagcctctttccaggtgagagcaaatttatcttttaatccagcagcattgacatgagtgagattggaacttctgagcttcttgggttgcaaaagagaccaaaagtctaccttttggttaccagcagccatgggtcctggtaaagtggtatgagatctaatatgtgaaatatagaaagggtgtctacattggtgaaccacctgttgtaaccttgaagataagccaattcagaattatcaatatgtttaatagtagcagtttctatatttttagtggcatgcataacataagcagaatcagagacaatatttaaaggtttggggaaaccctgtaaggcagtaattacagcaattaactctgccttttgagcagttgtataaggggtagaaataagcttgtctgtaggacccacataaccagcatttccgttactggagccatcagtgaacgctgtaacggcctcaggaatgggctgatctttggtcagtcgaaggaccacccaataagtcatttttataaaatcaaacaatttgttttttggaaaatgattgtcaataacgctgataaaatcagccaagtgaattttccacagtatggaatgttgagaagcggcctgaactttgagccgatttaaatgaaccacaattaaatttggatcaaatccggaaatttgaactattctacaccgagcttgtccaattagggtggctattttagaatgaggaagaaaacaccactctactaaatcattatgttgaactattagcccagtaggggagtggaatgaagcgaaaactagaagctgaaaaggctgagacagctgtaccctagacaactgggcagtttggattcttctatgaattgcagttccaatgaagcctcaggggtcaaagttctgggactgtggagatgggaatcttcatgcagcatagaaaacaagttagcacatatgttggaatgcctaaagtaggtcttaaataattaatgttacctgctgagaccagctcggttggggagaccctaacccagcggcgctagaggaattaaagacacacacacacacacacacaaatatagagctgtgaagtgggaaatcaggggtctcacagccttcagagctgacagccctggacagagatttacctacgtatttactaacagcaaaccagtcattaacattgtttctatagatgttaaactaactaaaagtatcccttaaggaaaacgaaaggatgggccaaattaattgcagcaggaagatgcccttaagacacagatcactcatgtttttgtttgcggcttaagaatgcctttgagcgattttccgcctgggtgggccaggtgttccttgccctcattcccataaacccacatcctttcagcttgggcgttagggccattatggacatgttatattgctgcagagattttgtttatggccagtcttggggccagtttatggccagattttggggggcttgctcccaatagttacccaaaagtttttggaaatcacttaaggttttcaaagaatctctcctaatctgaacattttgaggttgaatacattctttatcaactgccattcctaaatatggaacaggaggtgtctgttgaattttatcctgagcaatgtgtaatccagcttctgtaactcagcggctcaaaaattgataacagtcaattctttgtcagtggggtcagcaattaatatcaatataatgaagaatataggcctggggaaattgagctccaactggtgaaagcatctgtccaatataaagctggcagatggtagggctattcagcattccctgaggaagtactttccattgataatgaactgcaggctcctgattattgatagatggttaaggcaaatttttcacaatacgatttatgtaaagcagtatgaaagaaacagtctttaagatcaataactatgagaggccaattcttaggtattaaagcaggggcaggcatgacaggttggatggctcccataggtttaattacaacattaatggcccttaaatcagttaccatccgccacttgcctgatttcttttttactagaaacacatgagaattccaggggggaaagaagattccacatgtccaagttgtaactattcagaaaccaattgagttaaagcctccagtttttctttagagagcagccactgatcaaacaggtgtttccaatttccattataaaggcataggattaggaggcatggcattggctgccattaaaagggataacgtaaaccatccctgtcttcttttacagtaacttgaagaggtttagtaattccttcatgttttgggctggtaccgagtctgggaacaaaccccatgtttttcattatatgttgggtgggagcactataagagttatgtggaatattaatttcagtcccccattgtgccagcaaatctctaccccaaagattaatggggattggcatgatataaggctgaattgtacccttttgaccatcagggccagtgcaaggcaagataaatgttctctggggaatttcatcagcttttccaacacctactagtcccatgttagtgggatgtttaagccaggaggaaggccttaaattagaggaaataatagaaacatcaatcccagtatctactaggccatcaaacttttttccttgaatgtgtttggtgcaggtggaccattgtttagaaattacattaatccaataagcggctttttcactgctggagcccatcccagggccccgtgtcttatctcctttgtttaaaacaatattaggtagtaaaagtaattgagcaactgactcactgactggaatggaaacaggaaccttggcagacaccataagtttaatctcattacaggaatcagaattaatgagactagtatgaacagtgattcctttagcagaggtggatgccctacctaacaccaggcccactgaaccttgaggtaaagggccagtgacccccgtggggacaattacaggcaaagaattaggtagtaaatttagaggaatggtactacagagatctactgctccacccccctactgtgaaggtggacaagcattgtactgagacagaagaggctgggacccacctgggttggctgtaggtaaatttgtttgtgctgggggctgcattgggactgcttgaagtgggaacacattggtctgagtctgaggtgttccatttgatattggggcctgggactggccctgctttctgtttccctggttctgtggcaagggatttccatctatatcagacttagaatggcaagtacttgcccagtgtttacctttatggcaatgtgggcaaacagtagcagcagcatttggctgtgtttattgagccagcttggctgcttttaagtttttaacaatgcaatttttttgagtatgaccaagttgactgcaattatagcaggctccaagaaaagaatcagttgagccagtttgattgccatccttcgtggcccatgcccacagaatagctttgtgggtctctgatctaatgccttcacaagctttaatatatgcaggcaacaccttgtgatcaggtaaattttgtcgttggatggaacgaatggccattttacactcatggttcgcattctcaaaagccaacatatgaaggagaataccttgagcgtgctcatcagagacagatttttgaacagcatcttgtaatttaaccaaaaaatcaggatataattcattgtgactctatttaacagtagtaaaagaaacaggagcttggcctggggcacgtaatttatcccaagctctcatacacaactttgttacttgttccatggtgaaagcatcaaaacttgattgaacagtagtatcagattaattatcagagcctgtgaactgagcttgagtaattagaatgccatcagcatgatttagctgagcctgcagacgggccttctctgaccacaaggtatgcaattgtaaatgctgagatggagttagaacagtttttgccaaaatgtcccagtctaaaggaagcagaatgacctcagtacaaagagtctgtaataccattttagcatatggagaagtaggaccatactgagtacaagcatccttgaattcttttaaaaacgtaagattgagtggcacatactgatgcacttgtatccgagcatcaggaggttccagcacgaccagataagcccacacctctaatccacttgtttgtttgttttggcataataagcgttgggtggaagtttcaagagcaggaacatgagacagagtcagcatagaaatgacaggaaaagcatgtgtagataagggaaactgaggttgaggaagtcagactggtatgagagtgtgagaaaggggcatgggggagcagaagaggcagaagcatactggtgattattggcgtccatgcatgaagaagggtacagagaagcaggttgaatggatggcaaagtgactggatgagggaccaaaatgacaggagggtgaggagctgcagtagatgggggatggtctgcagaagtacaggtgaattgtagtttggtcccagagccattaggtggctccggaggcaaagaccgcaaaggtttggagagggaagagttagcatagatatggtcctgggctgtctgtgtcagggccgtgagagccacaagtattggttcttcatgaaaagaaataagatcatctgggggtgacattaagccaaagtcaccagagttagatattgaatcctcaacatcatcaggtgggggaggagtaggtgaagggagacgctgagcagataacaaaggccgaacagaagaggaaagctgaggaagaggtagagagagggttgccagattcagaaaattgtggtaactgcagggggttatgggattggtatgtcattaggatggcacttacaaggccaaatcaccccaaacggtgacaggaacataatttcctgtcgggaccagttcctggaatcttacaccaacacgatcccatagttccacatctaacgttcccttttcaggaaagcaaggacagtgttcttccaccaccctgaatagggtgaccatattttccatggtcactcaaactcctccctgttttaacaggagtttaatatagtagagataagcataatgtttagactctgtgtgacccatacttaccccagacaatacacagacaactcaccaatcatcagggagccgaacaagtgtttctgtggtctggaccaataaacatttctccacacctaccaaagggaatcgggttcccacatgcacttaggataaaaccatgttggcatgccagatattgggggaacttgcccccagtatttcaacataggttctttctattttccataattgtcggccggtctgagaaataaagagtacaaaggtaggaattttacagctgggccgctgggggtgacatcacatatcggtaggaccatgatgcccacctgagccacaaaaccagcaggtttttattaaggatttcaaaaggggagggggtgtaagaacagggagtaggtcacaaagatcacgtgcttcaaagggcaatatcagaaactcctgataagggtctatgttcagcggtgcacgtattgtcttgttaaacatcttaacagaaaacaaggtttgagagcagagaactggtctgaccaaaaatttaccaggctggagtttcccaatcctagtaagcctgagggtactgcaggagaccagggcttatctcagtccttatctcaatcgcatagaacagacattcccagaatggccgtttatagacctccccccaggaatgaaattcttttcctagagtattaatatcaatattccttgctaggaaaagaatttagcgatatctgcactgatttcatattgttcaaacacacgttttacaatcaatttgtacagttaacacagttatcacagggtcctgaggtgacgtacaccttcagcttatgaagataacatgattaagagattaaagtaagacaggcataagaaattataagagtattatttgggaagtggtaaatatccatgaaatcttcacaatttatgttcctctaccgtggctccagccggtccctccatttggggtccctgacttcccgcaacatctttgagcttctttaaaatctatattttgaagtctttttaaagtcttttttttttttttttttttttgagatggagttttgctctcattgcccaggctagagtgcagtggttcaatcttggctcactgcaacctccaccttccaatttgaagagattctcctgcctcagcctcccaagtagttgggattacaggtgcccaccaccacacctagctaattttttttttgtattttttagtagagacagggtttcaccatattggtcaggctggtctcgaactgctgacctcatgatccacccaccttggcctcccaaagtgctgggattgcaggagtgagccactgcacctggcccttttttaaagtcttataaagtcatttcaataatttttttttcttagagtactgaagaattatggaatttctttaaaagtggaataaaccttgcttatctgtgtttcctgtgtatttctgcgtctttatactgatttctgcacatctggagagacaattgcttcattttattttagaatttacattcactggagaaagcttttttttaaattgaagttactatcatgatgtttattgcatagaatcatttggctttactttggggtttgtgcatgggaaagactctgtataagtttcttgagtataagcaaatatatatatatataaacatgttttactggtttaggaatcatgttttctcttaggttgatttttaattctaagtctcagaaaacaattattttttctttgttgtgttggtcattgaaagccagcacacctgacctgaaagggtgagaaggtaggtagggtggggggtgggtgatgagaaattacttaatagttttaatgtacattgttagagtgatggataccctaaaagccctgacttcaccactatgcaatctatgcatgtaactagattacacttgtacccaacacatttgtatagataaattgaaaagaacaactagagtttgctgtcttgcttattcatacatacaaatatgttataaatgtttcccatgacattaactgttgtagatacaggagttagaaattatttaggcagatagtgagtgcaaggaagtccttggtaaagtttcccttctaataaaaagcaacacacaaattatttcttttttgacaaagagcagcctgtaaaatcgagctgcaaacatagataaccaaggtggaagcttgcatgaataaatgccagcagctgtgccaataggaaaggagctacatgtggactgcgcatgttcaaaatggtagctccatcttcccttgtctttgtaaaccagatgtagagtaagaagcaggcaacacagtgctggcaaatgctccgtttgcataatagaagattagggtggggcagccaggtttctcatgcactctgtaaatgtccacacctgatccaaccaatctttgagccctatgtaaattagacactgcctcctgaagccagtctgtaaaatccgctgtgcttcactgagggctggaagtcccacttgggtgccccactctttttcaggagattcaggagagagagctattctcctttcttttgcctattaaacctccaatcctaaaccaacttcttgtgtgtccatctactcgatttccttgacatgagatgatgtatctcaggtatttaccccagacaagtgaccctgcttcattatgttaaaactaattaatttattagttaaaattgctatattaagaaatatagcacattttaaaggccactgatgcaaagtgcaaaaactgctacgtacaaacatgacatcaaattatacttccagtaacagtgttagaaaattcttgtttccctacacttaccatttatgaatagtttaatggaacatgttatttaaaaaaatatttcccaggctgggtgcgatgcctcacacctgtaatcccagcagtttgggaggctgtggtgggcgaatcacctgatgtcaggagttcgagaccagcctgagcaacatggagaaagcccgtctctactaaaaatacaaaattagccagcgtggtggcacatgcctgtaatcccagcaacccaggatgcttagttaggagaatcacttgaaactggaaggtggaggttgcggtcagctgagctcacaccattgcactccagcctgggcaacaataacaaagttccgtctcaaaaaaaaaaaattgaattgcttagtcatgtcttctgcttattttgctattgaattatttaactttttactgattcatataagcttttggcatgcccattacagtaatcgtttgtccaaaattattttacacatatctccattcagctcccagtgtccaggttcaatatttttgaaagaaaaggagtccctgctttgtaaatatgcctactctttaaagagtttaaatactaattagtaaaaccctgttagggaagattaaacattgtctaattgaatttgatttgtggaaaataaatatctaacttttccattatgatttaaccatgtttacgaaggcagcccatacattctgggctcaaaagtctcttaaaaaagggaaaatgtattctatcaaagagggtaccagattccaagtttgcattgcactttgctgaacacattgtcttttttcaagcttaaactttttgaaaggttaccagtgttctctctgaaaacacagagctgctcatattacagccctgctgcaaaacatttgatggctcataacaccctacagagctgagcccccatcataattctaagcaatcattcatgtttccaacatctcttattgtctcatctccacacgaccctcccaaactatattcttttctcacactccacttgtcctaccctgtcatcaaataagcctcatatttttctacttcaaatcctgtacttaaactgctttttttggtttaaatgtatatttctcctttcccacattcttctactccacatggaaaagctgcacatgtgagagtatcaccttttctttccactgcagcttctcacttcccagttctccacttcttcttgctgattgtaaggcactggtgaattttagaactggaatcatattatatccatctttgcagttctagagcctggtaccaggtgtagatgtcaagaaatggttcccaatgcaagcttgctgatagtgatcttcaacagatgagacaagaaaggagccagaatgctagtctactaatccatattgctttccactattattttgctgaaactctcccaatgtcataagaaaaataacaatgaaaataataataatagtagtaaatacagaagataagtcagtgaaaattgagctggtagcatgcatgacttcaattctctatttattactagtttcaaaatagtccttatccacaaatagaagaaaacagacccttaagtgtctaccacaatgcaagacctgccaatttcataacttgctcaggcacacttataaaagaaactagacacactggtgaccccatctcaaacacactcaaaggagacagaagatcttcctctcactgtcctccagtacatgttgctcctcctgcttaaaaaagcaatacaacaaagaaataataccttccagaggctatcacatttgatcttggacaaatttttagattagtaatcaagtcaattcaactgttgcccttacttcactcatatcacatgttatgaaccacttcggatcaccccagtgcaaattctgaggcaaaaccttgattttctatgttatgtaaaataacaatagacctgtcctcaaggcattggccctacccaaagcaaaattaaatttcccaaacacttatgagtttacagtttcaaatctcttcaaaagtaggtttcatatgagtccttgaacagggttcagcactttcagtgagattaaagtgggtgtccacaagagataagagagcccccccactacccaccacacagaggaccaacagaattgtagaatccatgcccaccatttttcacttctagcatatctccccccatgtgaaagaccacctcccttccacatactatcctttccaatgagaacatgttaaaaatttcatccttggcagtattttttcagggttctactgtacttttccaccgggcctcagtctaccagcgttctgctttagtgtcttgttgaactccccctttttaagggcaaacaaatccccgtcagtcagttcacgtactaacatgacctctgcaagcccctcactccacaaaacaccaatctccattcctgaccatcacagaagggaaggtctaacttttgtggtcaaatattagctaaaatgagctgttgaatagctaggctgtaatttatttctggaaaccagaaccctgagttgacacacttatattcttcccttggtttgaccatcttttcccttgatgtgcctaatagggagaactctgcacacaggaggttttcagttagtgtttgtttggtgagcggatcatgtctctatggtaggtagtctggcaggggtaagaagcacagtcctttttcatgatattgattcttcctacccatgagcatggaatgttcttccatttctttgtatcctcttttatttcattgagcagtggtttgtagttctccttgaagaggtccttcacgtcccttgtaagttggattcctaggtattttattctctttgaagcaattgtgaatgggagttcactcgtgatttggctctctgtttgtctgttattggtgtataggaatgcttgtgatttttgtacattgattttgtatcctgagacattgctgaagttgcttatcagcttaaggagattttgggctgagacaatggggttttctagatatacaatcatgtcatctacaaacagggacaatttgacttcctcttttcctaattgaataccctttatttccttctcttgcctaattgccctggccagaacttccaacactatgttgaataggagtggtgagagagggcatccctgtcttgtgccagttttcaaagggaatgcttccagtttttgcccattcagtatgatattggctgtgggtttgtcatagatagctcttattattttgagatacatcccatcaatacctaatttattgagtgtttttagcatgaagggttgttgaatttttcaaaggccttttctgcatctattgagataatcatgtggtttttgtctttggttctgtttatatgctgggttacatttattgcatttattgatttgcatatattgaaccagccttgaatcccaggtgcacatgtaccctaaaacttaaagtataagaataaaaaaaaaaacagtcctggggacaaacttaacagtttgagttctaatagctggctgcctctctgggtctctattccctcatcttaatcttcaggataataattacatctacatctctttttctttctttctttcttttttttttttttgtttgtttttttgagatggagttttgctctgttgtcaggctggagtgcaatggcacaaacttggttcactgcagcctccacctcccaatgaataaaaaagataatgtgtaaaaaataattaggatcctggtagctagtgctcaataactgttagatcttaagacttctgcttctactgctatcatgatgagtgtgtttggcttaacaggtctagcgcaggtagaagagaaatagaaacacttaacccctggtttatctgatttaatgcaaatacaagcaaacttggctaagaaatgcttttcaccaaagtttgtctgcaatttgaatgctttagattaaacttagaagagtatttaaaagtattctagacaggccaacagcagtggcacccacctgtaatctcagcacattgggaggctaaggagggtggatcacctaaggtcaagagttcaagaccagcctggccaacatggtgaaaccctatctctgctacaaatacaacaattagccaggcatcgtgataggcacctataatcccagctagtggggaggctgaggcaagagaatcgcttgaactcaggaggtgggtgttgcagtgagctaagatcacaccactgtactccagtctgggagacaagagtgagattccaactcaaaaaaaaaaaaaaaaaaaaggcactctagacagattcatttgtaatataagcatgtcatagtttctggtgtataggacttgatttctgtttatttagttttctgaagaaacacaagagacagcccctagctactacaaaacttcctagagacaagctggacatatgagcccttacaaaattccatttactgtaaagataataatgaaataatctctaaacataagaatttgactagtgttaaccactccacttccccaatacactgatgtttatatctctttcttatcataatacaaaacaaacacatgaccacacaccatctgctctccagtgcagaacagaataacagaggcacaaagcaagcttcagaacacacagaccaccatgttcaccacatctacatctggggctgcttaagaaaaggagcaaaatcaatgagaaactgagaagatgtgtgactaccctgttttcagcacttattgtcacaagaagaccgaacatgcacacacactctctcattccaaggcagagcatccattttcctgtcgaaaaagtaatttgacagcatagatccctatctcacattctgagcaagatgacactggctttgggcatgcaaagaatgggcatattacagacacccttaagacacaacgcatggcctgccttacctgatacaatttttaatttctctgaagtaaactcaaattacttcttaagtaaactcaaatttcaaacatgtatttctttattaacattccattaatttcctcatgggcttcacaggaaatatattctactttcattcacttaatctcaccataatagatggtctaaaatatccagaagacagccatatgtaacacatacccataccccaaagcatagaaaatgtaacacacaaaggccttgaggaagcaacactataacagtgcaaatacacaaatatttaaggaagaatacatcacccaacagacagcatacatggtcaccactatccaggactctccataataagtagctatgaattgcttattctaaagttggcttatatatattcatcaccacaaattagttctgaacatactgattttaattttggatattcacaaggtaattatctggtaaaatatatttataactaatttgtaattagactactaaatgcacgcatatgcttaggtcacagtgaggcaaaaatctgagttatttgtagagtaaattaagatttaaatttttaaatattaattaatttttaaattttcaaagaatgctgtcatgcaggcctgcactaagtcaagcagatgactgacaaccaccctcttctccctgtctcctttacacaataaatgtgaagggctctagaagctcaggcccttcttcaccagaagcaaggagccctctgacctattcttccaaacatactcttttgtctttgtctttattcctgcatttatcctcctttgttcagtccaccagggtcagtggcaaagtggtgtcatgaatagggacttcgaggaagtgaacgaggaagatctgctggagcacaggaagtgaaatagacaagatgaatggggaccccaggacaaatatgctggcagtggatataaggtcagtgctctaaaaaagtactgggaatgggaagtttctgaatgacggtaccatggggcagcatttgtctgttgaagaaaaacattatgtgcagttgcctaaagttgtgttgaaacagtctggatctcaagttaattcacagacattagctaaacttctgcaggaggttattacacataacccattgtttccacaggcaggccctcttgatgtggaaaattgggacacagtaggagagggattgaaatgggctcatcaaaaagtctcaaagtagacccttctgttttttctgcttggggtttggttcgcatggtcctactgctgctgtctctttattctgccaggcaacagaagtcagtttctgagtctcaagaattaaaaaactcatttgttcctccaacagtgcatattgaaaataatgagcaggagaaagggggagaattggccatttgctaagcagaaaaaaagagaggagaattggcctctgccaccccctccaataacagaagtagaaacccccacacaacaaattttgcatgctgctgctatggcaagggaacttttgggaccttatgcttttcctattaccataaggcttgatctgaatgatccaccacatttttgacatgaacacactcttgtagagtttaaattactaaaagaattaaaaactggtgtggttaataatggagtgcaaagcccattcactatagggctgttagaatcggtgttcagagccatgtgccttccaccttttgatgaaaaacctttggcttgcacttgcttatccaccagtgcatatctgacatggagtttaaattggcaagaaatgtgtgcagaccaggctaggcagaatcgcaccgctcttcaaggaaacactacagaggaaatgttgatgagctgtggccccttttcagatctggtacaacaattaacactcccatcagagaggccacttaccaccagtcttccttagccaccaagcatgtttggagcacaattcctgaagagggagttacagtgcagtcttttctacatgtcacacagggatcacaggagccttatgcacaatttatcgcatggctgcaagatgcagtgcagcatcagatcactcatgcctctgctgcagaaatgcttaccatagctctagcctatgaaatgcaaatgcagattgcaagcatgctcaagcaatggctagtttaatagttgacaaatctaaaaggagccaaggatcaaaccctaaagtgggagaatgttataattatggaaaaactggacattttaaaaaggaatgccaccccagacctcaggacaaaaaggatcttacaatgtggtgcccccccccgcccagtggaaataatgccaggactctgtcctctctgtaacaaaggaaatcattgggctcaccgatgccactcaaaatttcatcacaatagcaccccctgtcaggaaatgagaaggaggcctggacccaggcccctcaagccatgagggcattcccagttcagaccacaaccccacttcaggggtgggtcccaggaggaatattgattgattccctctccccaggaacaccaggaagtgcaggattagatatccccaccagagatagaattacattagttggagaagacaaaccttccaaagttcccactggcatttggggacatttgccagcagaatacatgggactaattttaggcaaaagctgccttaacttgcaaggcatcactgtagtccccagagtagttgactctggttaaggagaaattcaaatagttttaatgtcaaaagatctttgtgtttttgaaccaggggaatatatagcacaattattgcttatcccctgcaaattacacccttctgcatgaaaggagaaatgaggaaataaagggtttgggagcacaactacatgcaaaatctatctattccaacccttagcctctaatagacccacctgtttggtacaaattaaaaaaaaatgtatgggcttatggacacaggagctgatgtgtcagtaatatccagtaaggattgacccccatcctggcccctcagactaatctccacatccctagtgggagtaggagcagctcaaagtgttcaacggagtgctgagattttaccttgtcttggtccggatggacaatcatgtactttccagccttatgttgcaaatatagctatcaatttatggggtcgagacttacttatagcattggatatgagacttacaaatgaaaactttaataacctaggatttaaaatgtcaaaggacatggaatatcagagtgggaaaggtttaggaaaattcctacaaggaaaccctaacccaatatcaataactggaaagacagacaaaaaagactggggccgggtgcggtggctcacgcctgtaatcccagcactttgggaggcagaggcgggtggatcatgaggtcaggagatcgagaccatcctggctaacacagtgaaaccccacctctactaaaaatacaaaaaattagccgggcgtggtggcgggcgcctgtagtcccagctactcggaaggctgaggcaggagaatggcgtgaacccgggaggcagagcttgcagtgagcagagattgcgccactgcactccagcctgggcgacagagcgagactccgtctcaaaaaaaaaaaaaaaaaaaggattgggacatcaggatttattattggggtcattgatacttttccaccacccactgccttacctttagaatggcttagtgacaaacctgtgtgggtggatcaatggcccctaacacaggagaagctagctcaacttcatctgttggtgaaagaataattggatgcaggacatttagaggagtcagttcccggaattcaccgatgtttgttatcctaaaaatagtccagaagatggcgactgctgcatgacttgagagctattagtgcacaaattaaaccaatgggtgcattacagcagggcttgccatccccagcagccattcctaaaaactggcctcttgtagtaatagatcttaaagattttttctttactataccattacatgagaaggataagcctcgatttgccttctctgtgccttctattaatcagagacatgctacaagccaaatgggtgagacatccggtcatgtatggtgacactgtctgtcgccgtttgctcatatggagatttctaaacaattaaaaactgacaatagacctgcttatactagtcatgcttttcaaactttcctacagctttgggctatgacccataaaacaggaattccttacattatagaccaggcacatcaaacgttacaacgcatgttgagaaaacaaaaaaaaagggtgattggacaccagccaccacctcaaacaaaactaagtttatctttatttactttaaattttttgactccttgtatgaatggtaagactgcagcagaaagacattggcaagtgttagaggaaattaggaaagtttatctgaaattattatggaaatccctggaagaaggacaatggaaaggtatggtggatttactgctgtggggacaagggtatgcttatgtttttacagcagatggataaaccatgtgggtgccctcaaggtgcgtgcaaccatggaatggaagactggaggaacccatggtggccaaccatgggcccggtccctctggtatgggccatgagccagctgagcctgagtgcaaaaatggacagaaggccaactggagtcatggtgacatcaacccctataacctgggggacactcaagaaaaccatgcaggaagctgagaaactactggagcgtcaaggccagaaaaaacccctgattccatgttcttggccatgttagctataatgccctgtgtggtaggttttcccttgcagagtcaaaaacatattgggcataggttcccaatcctccagcagtacaacctgtactttggagtgacactcctcctgagatctatcgtgatcagggagcatgggctccaggacccctatgtctggctcccccggacatagaacagttagactctcagaacaatgtcgtcaattatactaccccactggaaggactccccttgtgtatcactacaaagatgtcgctcaaccatagctgtcttacaactgaagctcaagcatggttgagtcaccttggaaaagttatgtacttaatagttcttggttctatttatgtaactggtgtgctaaccaaccatgcccggcccaattgccccaactgtgctgactatatggaatggattcccttcaatagttctgacctctctccattgacccagtgtcttggcccactgggtagaaaagaatctgtgttaactggagacattgtggattggggaactaaaggtcaactagatggaaaagaggaaaatcagaaatcatgacacaaacttcactgccattggtggcaagctttgaatactccttctttataccacaccgggatccaatcccagtctgccacctggattgcttggcatggagcaggctttagcacacctcttcctcagtggcattatctagggaggaaaggtccaattcaagaaacaatatggaaagcagcactgctgttcacaaacggtagtatccgggtaggaacactctctaataccagtactgctactcaacacagtcttaatgtcacatttgtaaagaatatcaccactcaacttatggtttgtggttttaatccttatgtctttttggcagctaaggcggaccagctccaggtaagcaatactcaattgaccttaaatcttgctggttatatcactgcattaatcatagcacattgcaaacatgtaatatctctactttgatatttgggtcacattcctgggctatggattctcattaatctgtctgagccttgtgatgccacccctgtttggcactttgtgaaacttcttctaactaaacttactcatcatgcctgtagagcctcaggcatcataatttttgctattgtttctttggtcacactaatcacttctgctgtaatgtcctctgtagctttgcatagttctgttcaaatggctcagtatgtagaggactggaggcatgcagccaactaagcatggctacttcagagtaaaattaacactgagttacaaactgaagtggtaatattaaaatccatggttctgtggttaggggaacaagtacaaagcttacagttgcaacagaaattgcactgtcattcacactcatatttgtgtaaccaacttagaatataaccaaagagtatccatgggaccttgtaaaagcccatttgcagggagctttcacatccaacatcacctttgacattggtgaattacaaaaaaaagttcttgatttaaataagcaaactcaagagtttcagccttctttagaagcctggactgaattccagcaaggcctggagagcctcaatccttggaactatctaaagtaccacattaacatctcatatatagttctgggaataatgttgttctgtctctgtttcctgctcatagcctgtaaaatcagatggattgccaatcagaaaataaagctgcccaacctggccttacattcattcaattaatgcaaaaacagaaagggagagatgttgggatccagaagcctgaggattgtgaccaacacagcattccactggaagctatatgatcaaagagcaaactgtttatcatgaatgcagaatgtgggcaaactcacatctgcacctgacactggaaggtatgctaaggggagccactccctggtgctgtgctccttgagattatctactgggacatctggagcctactgtttaaagaatgctgtcatgcaggcctacactaagtcaagcagctgactgacaatcagccccttctccctatctcctttactcaataaatataaagggctctagaactcagggcccttgttcactagaagcaaggagccccctgaccccttcttccaaataaacttttttgtctttgtctttattcccacattcatcttcctttattcaggccaccagtgtacatggcaaagtaatcaaaatacagtagtcagtgagcaccaaccatgcaattgtgctaggtaaggagatggaaaaaatatttttgaggtgggagaaacatcctaacagataaattacagcagacagacttgacagatgggggtaacagttattaggaacaaaagactgaattctccctagaaaaggtagtatctgagatgggtcttaccagaggagtaaatgttctttgctggggtaaggggatggacacacaacaaaaagaacaacccatgcaacagcacagggagtaaataattattcagtgtggcactgatgtggaaggtagagacaagagccaacactagaaatttggcttgtctcagcacttcgggaggctgatgtgggcagatcatgaggtcaggagtccgagaccctcctggccaacatggcaaaaccacatctctactaaaaatacaaaaattagctgggcgtggttgcatgtgtctgtaatcccagctactccagaggctgaggcaggagaattgcttaaacccaaaaggtggaggttgcagtgagacgagattgtgccattgcacttcagcctgggtgacagagaaagactccgtctcaaaaaaaaaaaaaaaaaaaagagaaaagaaatttggtttggaagcagatgacggtctttgtaaaacaagttaaggagtttggatttttctttttgtagacaacagggagccaagaaatattattaggcaggcaaacaactagagaagctttagtttttgaggatgatgactctgacagcagggtggaaaattaacagcagcagggagaaattagtggcagaaaattaacttaagaggtgtttatgactcaatgatggccttaggtcagaagtgattaaacagccaaagtcagtgactggagcatggttttgggggagagcctggtgactgattggacatgggggtgagagagacatgcatcaggacagccatcagtaatgttcctggcctagtaggttgtgtacattgcaatcatcttccagaagggatggagattactttcattattacaagtacctacaggatgagggatttgtagtatgatcaggatgacaaagagtacagcttcagataagttgtaagtgaaaatatagtgttagagttgccagtttataggttagaggagaggtaagaaaagcacaagaatgcacaggtcattctgcaagaacaaaactcactcccaggtatgggactgcaaaggtcgctgcagagaacaggcattgggtaactggcaactgacaccaatggaatgcttacagtctgtccacagatttaagatttttaaaacaactattctcaagtgttgcaaatgtctctaaggtaagtgggggcccagagcactttgggggcaactgtctgcttactgcaggcagccctttcttatctggaattcagtctcctcatcttcctgccttctcccttgcatatctcctgcttgtgtaatagggtggaaagtgggagggcaggacaaaggtcagaccaatagcactggttagctaaaagatcactcctttcattctactagacagttctggtctgaggcctgggatcccagaacataaaattattactctgtcctttattgcatccctgtattatccccatttccctcagccagagcatctggctgacatccaccctctcaagaggacatgtaggacagaagaccaggctcagaaaaactgctgtttgaaaagggcaggtagttaagtaagaattttggaagaacttgagaaattaaaattacggagactatgaatgcaaaaacactaactgtcaagcaagtaagagctaatttaaagaacttttttaaaagatatagtccacataacttgaaacatgcggaagactggcagatgactgcatcagagcgaatttcctaaataactgaggaggtgactgggaaaactgagccacctaccaaaacagctttacagagccaatgcatctcaattgttgtaaaagaagatgagttctagaactcttatttactatggagttttcaaatacattgaacatcacttaatgttttcctcaatcccaagcttcttgtaaaactttgaccttgccaaccatggcaccttagaggcagatgaaagcttacctattttatggaatttcagatttctaaatatagcacatgcaatacagggaatgcacccagtgtgcttgtggatgcaataatgaccactactacacctctcaagcaggctttgttgacttcagctctcctgacatttggggctgtcctatgcattgtaatatgtggagcagcatttctagtgtctgtacactaaaggccagtagcaccctttcccaaagcaagacactaaaaatttcaaaattctggaaaggaaatccacagtagacacccacaaagcttcctgatctcaaaatataccactttattccatatgtaggttttgagtttctgaaacatttgctttatgcttacaacaatcccatgaggtagaaaagctactgacaagatgcctgtcatcatattcatcaatggcaatgccaccaaaagctaaagtttcattttaaattcccttataccttcaaatcaactgaatttattttgaaaaaaaataatggtcttctttattaaaaataacagcacacatatacagaggtaaataagcagtatacatttaaaactacattgttttgagatcaagctgactgtataaagcagctgttccatggggctaagcaataggaactgtggatcctgagcttaatgtattgccagcccctgggtagatcataaagcatctataacagtagtcaatatgcccacccaaccctaatagttttgctctgagtagaaatgtgaaatctttgctgagtgctttcaaaaaacagggtgaaaataacttagtccaaaaaggtacaccaaaataaacaaggaatattttaaagtaattaaaccaccagaaatatcagacattttctataatcctaccccattgtctctgagaaaagggaaaaagaaaatacaaagcaagctatccaaagacaaatacagcttttaaaagctctatctaattaaccccaccaaaaatttttttggctacctagtatatgcaggctctgcacaatgtgggacagtggtccccaacctttttggcaccagtgtctggttttgtggaagacaatcttcccacagatgtggtgggatagttttcatttgggatgattcaagcacattacacttactgtgcactttgtttctcttatgattacattgtaatagataatgaaataattatataactcaccatattgtagaatcagtgagagcactgggattgatttcctgcaactaaatgttcccatctgggggtgatgagaggcagtgacagatcctaaggcattagattctcataaatagtgtacagcctacatccctcacatgcacagttcacaatagcagttgcactcctatgataatctaatgctgctgctgatcggtaatgcaagtgatggggagtggccatgaatactgatgaagctttgctaacccaccattcacctcctgctgtacagcctggtttgtaacaggacagactggtatcagtctgtgctctggtgttgaggacccctgacgcagggcaactacatttatttatttatttatttatttagtgcaatggtgcaatctcagctcactgcaaacttcacctcctggtttcaagcaattgtccagcctcaaccttccaaaatagctggaattacagacacatgacaccacgtcctgttaattttgtatttttagcagaggtggagtttcaccatgttggtcaggctggtctcaaactcaggatctcaggttattcacccacctcagcctcctaaagtgctgggattacaggcatgagccactgtgttcttctgacaactacatttattaccagccatttattaccaggacacctatgttgtgcagtgcctggcatacaccaggtacttaataaacagctattgatctaatgcaggactaataaggtaaggtgtattttttctccttctacatgctgtgcctgtgtcagatgcaaataagacctcaggagtctgcctgaagagacttaaaataaaactctttcatcaagcagtcacttggatggtgtaacaagttacatatgaatgtgtcacctgtaacagcttagtgacatgcatgtttaccatcacataacaaacacatgtctgccatgctcagggcttagagtctgaatttctaatgagaaataaagtggtacctagaaaaccccagaaatgatactccatatatccataagcatcagtagcatttccaaaaattgtcccacatccaacaaatcctttaaaaacaagatatgctaacatgcatccagtttagcggaatttctaaaaatgataaacagtgcaacttcaaacacctgaaatggagcacaagacccttttgaaggaattcatatccattcctgcaaaagttctgtggactcttgaaggtagcacagaactaagcattttttgtgtgtttccaaaaggttttagcctagcctttggcctctaacagactctctgattaaaatatggcttagaaactctacctgcctacttgaaaaagcatcaaatctggagaatgcttttcacgggtgtgaaaaaatgaaaacaaaatcacattcttctctttgcaattccctttcccccaccttccacttctattaaatatacttcagcatcattgtgcataggtgcagggaccattacatatctaaaaaaggaaaaaaccctcaaatatatggggatgcactggcaactttgcctttgcagaaatcattttgtttccaccagacagaagcgtctcactattttcagcattctcatctaacaggcaaattttgtttttattgactttgaaaggggtaagcttaaatctaaactcttaaacaagaaccagggttcaattttctgttaatgaaattcccagacaggtttttcaacctaccaaatcattatagtttttattcacccttctctctctcttcacaaccactaacatcaccacccacaaaagaagaagacaatccctccaatgttccccaaacgtgtgctgctgctagctcagaagttgtgtagagttttgtaattgagtgtgaaccgctggcctggatctgggctcgtgaatcacatgctcgatgcgcctctgcccagaaaatgcgctgcttcccagggaaagcgtcggctatgggaaggacctcccctgctccttagcaaacattagggtcgcagtttcctaagagacacgagtgggaaatgggggagtattggagaccagcctcaacaccacctgtggggtacctgaagtccggtggtgacgaagtaatgagaagagacaagagtgcaaaaggatgggggccagggggccagtgcaattcagaggctgcaaaggcgctgatctctggcctccacactatttattgagtacaatcacttagatctaagaagcagatgttcaggggtgaaatggtgaaagggaggtggtgtgtcacacacctaatctatagcagtggcggtttaggtaaattttctttgtgctgaagcagcataaacttaactactgatttattctttaacttatcggagagcagctgtggggggtgggcctaactaggaactagcaagtatggccacattccaatgcttcaaaggagtgtctttctccttgagcacagtgtttatagataagagagcaggtcacgctcttgtcatgggaacatgatggtaataaagaggctttcctcctcagaggcctcctgtggctttccacaacttatagtcccatatttttatggccagtttatacaggcactccataagcctttttcccagcaggggagggggcccaggcagaggctggtgctggggttagagaaagctacactaggtgtctggctggtgtgggagcaggaagggaagccccagaacaagccacaaattgttccagcaggagtaggccccctgcctttttcctggactaacgacggcacccggcactgagcccctcacttctgcaaggaagtgctctccacaccgacggtccttgtgaaacacgcaccccactgatggaagggtgaggaatgataggcgccccatggccaggccgtggcccccttctttcctgggcgccttaggtggtagtcagccacaccacaactgccagccaggaaagggtaagggcgtagggctgcctgctgccccctcagtgccagtgtcctctgcccagaaaggtcaaatcggcagagcagggtgcggaaagcaccctggtgagaacaccctggtgagaacaccccaggaggccaactcctggccggcacccacgatgctttctggctgcagaggaaagcaggatccctagtttccaggcttccctgccagagagagactggaaagaccatagaaggaaagtttctcctttcacagggggaaggatacagggagacagcgcagaagttggagagcagcatcgaaatgtttctggcctatgtggcttgcaccatccgattcccggcagtgttataacagataaattcatcccagtattccgggaggccaaggagggcagaacacatgtgcgcggaagtttcagaccagcctgggcagcatggtgagatccaatcactacaaaaatagttaatcaggtgtggtgggccacgcctgtattcccagctactcgggaggctgaggtgagagaatctcttgaggctacagttagtcataagcttgtgccactgcactccaggctgggtgacagagtaagaccctttctcatagaataaataaataaataaataaataaataaataaataaacatataaataaactcggccgcctgggttgggccggattcttagcttccaaaagctaatattgacgcacttcaggtcttgctagcacagcgctgcagagactgccacaaagtgtgctgggtgctgcttgttgttgccagtggctaggtaagaggcggagtaagaatgtaggagtggagaaaaaggaggagaaaaagagaagagtagaagagaaggagaggtgggaaaggaggagagataaagggaggaggaagtgagagaagaagagaagaaaaaatgcgaagaagatagaagagagaaagtggtgaaaaaaccggaagggaacaatgggactagaagagaagaggagaaaaaacctggaagaaggagtagagcaggagaaaaagagaaggaggaggaggagaggaaaaggagaaaggtgaggagaagaaggaggacgaggagaagaggagaagaaaataggaggaggagaggcgagaaagagcaggagaggaggaggagaggagaaggaggaggaagcaaagtagagtataagaggagaaaagggggaggagaagagatgaatgaggagagaaggaggaggaggagtaaggaaaagtagaagaaaaaaggagaagaggaggagaggaaaaggagtaagagaaagcaaagagaaaaagaaggaagagaggaggaaaaggaggaaaagaaaatgaggaagagtagaggcagaaaaggaaaagcaaaaggaggaggagaggagaaaaaggaggatagaaggaaaaggaggaaaaagaaaaaaggaggagaagaggggacagaggagaaggaggaggaggaagagaagagaaaaaagaggagaggaggagaaggaagaggagaggaggagaaggaagaagagaggaggaatggagaaaggaggaggagagaagaagaaggtgaaggggatgagagaagaagaaaaaggaggaagaggaggaaaaatgaaggaggagaaggtagaggataaaaaggaggagtaggagtggagaagaaggaagacaaaaaaaggaggtggaaaagaaggattagaagaggagaaggaggagaaggaaaaagaggaggaaaggaggaagaggtggagagaaagagaaagcagggaggaggatgcggtggactaggacgtggaggagaggagaaggaggagaggaggaggagagataaagaaggaatagtaggaggagagaaaaaggaggaaaagaggagagataaagaaggaatagtaggaggagagaaaaaggaggagagaaggagaggagatggaggaggaggagaggagtaaaaagagaaggagaggaaaagaaggagaagagaagaaggagcataggaggaggaggaggagaggaggtggaggaggacaaaaaagcaaaaggtgaggagaaggagggggagagaaaaaggaggagaggaaggagaaagagaaggaggccaggagaaaaaggagagggaggtggggaaaaggaggagaaaaggagaaggagaaggatagaaggaggagaagaagaaaaggaaaggagaaggaagagagaaaggagaaaaagaaaaaagaaaaaattagaagaagaaggaggaaagaacaagaaggaggagaggaaaaggaggagaaagtggataagagaaggggagtggaaagaaaaaaggaggagaggaggtgggggaggagaaaaaacgaggaggaagaagaaggaggggaaggaaaataggtggagaaggaggaggaagagaagaaggagagcaggagaagaggaagagaagggggaggagaggagaagaaggaggaggactagagaagacgtaggagagaaggacttggagaagaggaggaaaggaaaaagagaagaaggagaggaggaagagaagaagggaaaggaggagggcgaggagaaggaaaggagtaggtaacaaagagaaggagagaagaagaaaagtaggagaaaagaaaatggagaaaggagaataaggaggacaggagggaaagagaagaaggaggagggaaagaagaagcggaggatagaaggagtacttagagaggaggaaaaggtggaggaggatagcagaaggaagagaaaaaggagaaagaaaggaggagggggtggagagaagaaagaatagaggagaaggaggaggagaagaggaggcagaggagggggaagaaggagaagaggaggaggagcagaggaggaggaaaagaggagaaggaggagtagacaagcaggagaagagaaagaagaagaagcagaggagagaaggagaggaggaggagaggtggaggaggaaaaaagaagtagaggaggaggagaggaggaggaaaggaggagagaagggggagaggaggagaaggaaaagggaaggagacaggagaagaaggacagggggagaggaggagaaaaaggagaggaggaggacaggaggagaaggaggacaggaaaggaggaggaagaggagtggaggagaggataaaaagaaggtggaggaaaagaggaggaggaaaaggaggtgaggagaaggaaaaggagagaaggaagaggaggagtagagaaggaggacaaggaggagcagaaaagagaaaggaagaggagaaggagagaaggaagagaattagagaagaaggagaaggagaggagaaagaggatgaaaggagaaggaaaaggaggaagaggagaaaacaaggagaagggggagaagaaaatacataggagaagaaagaggaaaagaaggagaggagaagtaagaggagaggaggaggatgagaggaggaatggagcaggaggagtagaggaggagaagaggagaaaaaggagaaaagcagagaataaggaggaggagcagaagcagaggagagagaaaagtaagagatggagaagatgaggagcaggaagaggaggtggaggaggaataaaaggaggagtaggagaaaaggagaaagagttggaaaaggagaggagaagaaggaagagaaaaaagagaaggaggagaggagaaggaaaggagaagaagaaaaaggaggaagagaggaggaaaggaggagtagggggagaggaggagaaagaggggaggaggaggtggatgagagaagaaagaagaaaggaaggagaggaggagaggaaaagtaa
